United States Patent Application Publication US 2011/0318380 A1 - sequence listing, part 4

SEQ ID NO: 121737 - protein, 9 aa, Homo sapiens
GYIIPKDTE

SEQ ID NO: 121738 - protein, 9 aa, Homo sapiens
YIIPKDTEV

SEQ ID NO: 121739 - protein, 9 aa, Homo sapiens
IIPKDTEVF

SEQ ID NO: 121740 - protein, 9 aa, Homo sapiens
IPKDTEVFL

SEQ ID NO: 121741 - protein, 9 aa, Homo sapiens
PKDTEVFLI

SEQ ID NO: 121742 - protein, 9 aa, Homo sapiens
KDTEVFLIL

SEQ ID NO: 121743 - protein, 9 aa, Homo sapiens
DTEVFLILS

SEQ ID NO: 121744 - protein, 9 aa, Homo sapiens
TEVFLILST

SEQ ID NO: 121745 - protein, 9 aa, Homo sapiens
EVFLILSTA

SEQ ID NO: 121746 - protein, 9 aa, Homo sapiens
VFLILSTAL

SEQ ID NO: 121747 - protein, 9 aa, Homo sapiens
FLILSTALH

SEQ ID NO: 121748 - protein, 9 aa, Homo sapiens
LILSTALHD

SEQ ID NO: 121749 - protein, 9 aa, Homo sapiens
ILSTALHDP

SEQ ID NO: 121750 - protein, 9 aa, Homo sapiens
LSTALHDPH

SEQ ID NO: 121751 - protein, 9 aa, Homo sapiens
STALHDPHY

SEQ ID NO: 121752 - protein, 9 aa, Homo sapiens
TALHDPHYF

SEQ ID NO: 121753 - protein, 9 aa, Homo sapiens
ALHDPHYFE

SEQ ID NO: 121754 - protein, 9 aa, Homo sapiens
LHDPHYFEK

SEQ ID NO: 121755 - protein, 9 aa, Homo sapiens
HDPHYFEKP

SEQ ID NO: 121756 - protein, 9 aa, Homo sapiens
DPHYFEKPD

SEQ ID NO: 121757 - protein, 9 aa, Homo sapiens
PHYFEKPDA

SEQ ID NO: 121758 - protein, 9 aa, Homo sapiens
HYFEKPDAF

SEQ ID NO: 121759 - protein, 9 aa, Homo sapiens
YFEKPDAFN

SEQ ID NO: 121760 - protein, 9 aa, Homo sapiens
FEKPDAFNP

SEQ ID NO: 121761 - protein, 9 aa, Homo sapiens
EKPDAFNPD

SEQ ID NO: 121762 - protein, 9 aa, Homo sapiens
KPDAFNPDH

SEQ ID NO: 121763 - protein, 9 aa, Homo sapiens
PDAFNPDHF

SEQ ID NO: 121764 - protein, 9 aa, Homo sapiens
DAFNPDHFL

SEQ ID NO: 121765 - protein, 9 aa, Homo sapiens
AFNPDHFLD

SEQ ID NO: 121766 - protein, 9 aa, Homo sapiens
FNPDHFLDA

SEQ ID NO: 121767 - protein, 9 aa, Homo sapiens
NPDHFLDAN

SEQ ID NO: 121768 - protein, 9 aa, Homo sapiens
PDHFLDANG

SEQ ID NO: 121769 - protein, 9 aa, Homo sapiens
DHFLDANGA

SEQ ID NO: 121770 - protein, 9 aa, Homo sapiens
HFLDANGAL

SEQ ID NO: 121771 - protein, 9 aa, Homo sapiens
FLDANGALK

SEQ ID NO: 121772 - protein, 9 aa, Homo sapiens
LDANGALKK

SEQ ID NO: 121773 - protein, 9 aa, Homo sapiens
DANGALKKT

SEQ ID NO: 121774 - protein, 9 aa, Homo sapiens
ANGALKKTE

SEQ ID NO: 121775 - protein, 9 aa, Homo sapiens
NGALKKTEA

SEQ ID NO: 121776 - protein, 9 aa, Homo sapiens
GALKKTEAF

SEQ ID NO: 121777 - protein, 9 aa, Homo sapiens
ALKKTEAFI

SEQ ID NO: 121778 - protein, 9 aa, Homo sapiens
LKKTEAFIP

SEQ ID NO: 121779 - protein, 9 aa, Homo sapiens
KKTEAFIPF

SEQ ID NO: 121780 - protein, 9 aa, Homo sapiens
KTEAFIPFS

SEQ ID NO: 121781 - protein, 9 aa, Homo sapiens
TEAFIPFSL

SEQ ID NO: 121782 - protein, 9 aa, Homo sapiens
EAFIPFSLG

SEQ ID NO: 121783 - protein, 9 aa, Homo sapiens
AFIPFSLGK

SEQ ID NO: 121784 - protein, 9 aa, Homo sapiens
FIPFSLGKR

SEQ ID NO: 121785 - protein, 9 aa, Homo sapiens
IPFSLGKRI

SEQ ID NO: 121786 - protein, 9 aa, Homo sapiens
PFSLGKRIC

SEQ ID NO: 121787 - protein, 9 aa, Homo sapiens
FSLGKRICL

SEQ ID NO: 121788 - protein, 9 aa, Homo sapiens
SLGKRICLG

SEQ ID NO: 121789 - protein, 9 aa, Homo sapiens
LGKRICLGE

SEQ ID NO: 121790 - protein, 9 aa, Homo sapiens
GKRICLGEG

SEQ ID NO: 121791 - protein, 9 aa, Homo sapiens
KRICLGEGI

SEQ ID NO: 121792 - protein, 9 aa, Homo sapiens
RICLGEGIA

SEQ ID NO: 121793 - protein, 9 aa, Homo sapiens
ICLGEGIAR

SEQ ID NO: 121794 - protein, 9 aa, Homo sapiens
CLGEGIARA

SEQ ID NO: 121795 - protein, 9 aa, Homo sapiens
LGEGIARAE

SEQ ID NO: 121796 - protein, 9 aa, Homo sapiens
GEGIARAEL

SEQ ID NO: 121797 - protein, 9 aa, Homo sapiens
EGIARAELF

SEQ ID NO: 121798 - protein, 9 aa, Homo sapiens
GIARAELFL

SEQ ID NO: 121799 - protein, 9 aa, Homo sapiens
IARAELFLF

SEQ ID NO: 121800 - protein, 9 aa, Homo sapiens
ARAELFLFF

SEQ ID NO: 121801 - protein, 9 aa, Homo sapiens
RAELFLFFT

SEQ ID NO: 121802 - protein, 9 aa, Homo sapiens
AELFLFFTT

SEQ ID NO: 121803 - protein, 9 aa, Homo sapiens
ELFLFFTTI

SEQ ID NO: 121804 - protein, 9 aa, Homo sapiens
LFLFFTTIL

SEQ ID NO: 121805 - protein, 9 aa, Homo sapiens
FLFFTTILQ

SEQ ID NO: 121806 - protein, 9 aa, Homo sapiens
LFFTTILQN

SEQ ID NO: 121807 - protein, 9 aa, Homo sapiens
FFTTILQNF

SEQ ID NO: 121808 - protein, 9 aa, Homo sapiens
FTTILQNFS

SEQ ID NO: 121809 - protein, 9 aa, Homo sapiens
TTILQNFSM

SEQ ID NO: 121810 - protein, 9 aa, Homo sapiens
TILQNFSMA

SEQ ID NO: 121811 - protein, 9 aa, Homo sapiens
ILQNFSMAS

SEQ ID NO: 121812 - protein, 9 aa, Homo sapiens
LQNFSMASP

SEQ ID NO: 121813 - protein, 9 aa, Homo sapiens
QNFSMASPV

SEQ ID NO: 121814 - protein, 9 aa, Homo sapiens
NFSMASPVA

SEQ ID NO: 121815 - protein, 9 aa, Homo sapiens
FSMASPVAP

SEQ ID NO: 121816 - protein, 9 aa, Homo sapiens
SMASPVAPE

SEQ ID NO: 121817 - protein, 9 aa, Homo sapiens
MASPVAPED

SEQ ID NO: 121818 - protein, 9 aa, Homo sapiens
ASPVAPEDI

SEQ ID NO: 121819 - protein, 9 aa, Homo sapiens
SPVAPEDID

SEQ ID NO: 121820 - protein, 9 aa, Homo sapiens
PVAPEDIDL

SEQ ID NO: 121821 - protein, 9 aa, Homo sapiens
VAPEDIDLT

SEQ ID NO: 121822 - protein, 9 aa, Homo sapiens
APEDIDLTP

SEQ ID NO: 121823 - protein, 9 aa, Homo sapiens
PEDIDLTPQ

SEQ ID NO: 121824 - protein, 9 aa, Homo sapiens
EDIDLTPQE

SEQ ID NO: 121825 - protein, 9 aa, Homo sapiens
DIDLTPQEC

SEQ ID NO: 121826 - protein, 9 aa, Homo sapiens
IDLTPQECG

SEQ ID NO: 121827 - protein, 9 aa, Homo sapiens
DLTPQECGV

SEQ ID NO: 121828 - protein, 9 aa, Homo sapiens
LTPQECGVG

SEQ ID NO: 121829 - protein, 9 aa, Homo sapiens
TPQECGVGK

SEQ ID NO: 121830 - protein, 9 aa, Homo sapiens
PQECGVGKI

SEQ ID NO: 121831 - protein, 9 aa, Homo sapiens
QECGVGKIP

SEQ ID NO: 121832 - protein, 9 aa, Homo sapiens
ECGVGKIPP

SEQ ID NO: 121833 - protein, 9 aa, Homo sapiens
CGVGKIPPT

SEQ ID NO: 121834 - protein, 9 aa, Homo sapiens
GVGKIPPTY

SEQ ID NO: 121835 - protein, 9 aa, Homo sapiens
VGKIPPTYQ

SEQ ID NO: 121836 - protein, 9 aa, Homo sapiens
GKIPPTYQI

SEQ ID NO: 121837 - protein, 9 aa, Homo sapiens
KIPPTYQIR

SEQ ID NO: 121838 - protein, 9 aa, Homo sapiens
IPPTYQIRF

SEQ ID NO: 121839 - protein, 9 aa, Homo sapiens
PPTYQIRFL

SEQ ID NO: 121840 - protein, 9 aa, Homo sapiens
PTYQIRFLP

SEQ ID NO: 121841 - protein, 9 aa, Homo sapiens
TYQIRFLPR

SEQ ID NO: 121842 - protein, 9 aa, Homo sapiens
MSPLWWGFL

SEQ ID NO: 121843 - protein, 9 aa, Homo sapiens
SPLWWGFLL

SEQ ID NO: 121844 - protein, 9 aa, Homo sapiens
PLWWGFLLS

SEQ ID NO: 121845 - protein, 9 aa, Homo sapiens
LWWGFLLSC

SEQ ID NO: 121846 - protein, 9 aa, Homo sapiens
WWGFLLSCL

SEQ ID NO: 121847 - protein, 9 aa, Homo sapiens
WGFLLSCLG

SEQ ID NO: 121848 - protein, 9 aa, Homo sapiens
GFLLSCLGC

SEQ ID NO: 121849 - protein, 9 aa, Homo sapiens
FLLSCLGCK

SEQ ID NO: 121850 - protein, 9 aa, Homo sapiens
LLSCLGCKI

SEQ ID NO: 121851 - protein, 9 aa, Homo sapiens
LSCLGCKIL

SEQ ID NO: 121852 - protein, 9 aa, Homo sapiens
SCLGCKILP

SEQ ID NO: 121853 - protein, 9 aa, Homo sapiens
CLGCKILPG

SEQ ID NO: 121854 - protein, 9 aa, Homo sapiens
LGCKILPGA

SEQ ID NO: 121855 - protein, 9 aa, Homo sapiens
GCKILPGAQ

SEQ ID NO: 121856 - protein, 9 aa, Homo sapiens
CKILPGAQG

SEQ ID NO: 121857 - protein, 9 aa, Homo sapiens
KILPGAQGQ

SEQ ID NO: 121858 - protein, 9 aa, Homo sapiens
ILPGAQGQF

SEQ ID NO: 121859 - protein, 9 aa, Homo sapiens
LPGAQGQFP

SEQ ID NO: 121860 - protein, 9 aa, Homo sapiens
PGAQGQFPR

SEQ ID NO: 121861 - protein, 9 aa, Homo sapiens
GAQGQFPRV

SEQ ID NO: 121862 - protein, 9 aa, Homo sapiens
AQGQFPRVC

SEQ ID NO: 121863 - protein, 9 aa, Homo sapiens
QGQFPRVCM

SEQ ID NO: 121864 - protein, 9 aa, Homo sapiens
GQFPRVCMT

SEQ ID NO: 121865 - protein, 9 aa, Homo sapiens
QFPRVCMTV

SEQ ID NO: 121866 - protein, 9 aa, Homo sapiens
FPRVCMTVD

SEQ ID NO: 121867 - protein, 9 aa, Homo sapiens
PRVCMTVDS

SEQ ID NO: 121868 - protein, 9 aa, Homo sapiens
RVCMTVDSL

SEQ ID NO: 121869 - protein, 9 aa, Homo sapiens
VCMTVDSLV

SEQ ID NO: 121870 - protein, 9 aa, Homo sapiens
CMTVDSLVN

SEQ ID NO: 121871 - protein, 9 aa, Homo sapiens
MTVDSLVNK

SEQ ID NO: 121872 - protein, 9 aa, Homo sapiens
TVDSLVNKE

SEQ ID NO: 121873 - protein, 9 aa, Homo sapiens
VDSLVNKEC

SEQ ID NO: 121874 - protein, 9 aa, Homo sapiens
DSLVNKECC

SEQ ID NO: 121875 - protein, 9 aa, Homo sapiens
SLVNKECCP

SEQ ID NO: 121876 - protein, 9 aa, Homo sapiens
LVNKECCPR

SEQ ID NO: 121877 - protein, 9 aa, Homo sapiens
VNKECCPRL

SEQ ID NO: 121878 - protein, 9 aa, Homo sapiens
NKECCPRLG

SEQ ID NO: 121879 - protein, 9 aa, Homo sapiens
KECCPRLGA

SEQ ID NO: 121880 - protein, 9 aa, Homo sapiens
ECCPRLGAE

SEQ ID NO: 121881 - protein, 9 aa, Homo sapiens
CCPRLGAES

SEQ ID NO: 121882 - protein, 9 aa, Homo sapiens
CPRLGAESA

SEQ ID NO: 121883 - protein, 9 aa, Homo sapiens
PRLGAESAN

SEQ ID NO: 121884 - protein, 9 aa, Homo sapiens
RLGAESANV

SEQ ID NO: 121885 - protein, 9 aa, Homo sapiens
LGAESANVC

SEQ ID NO: 121886 - protein, 9 aa, Homo sapiens
GAESANVCG

SEQ ID NO: 121887 - protein, 9 aa, Homo sapiens
AESANVCGS

SEQ ID NO: 121888 - protein, 9 aa, Homo sapiens
ESANVCGSQ

SEQ ID NO: 121889 - protein, 9 aa, Homo sapiens
SANVCGSQQ

SEQ ID NO: 121890 - protein, 9 aa, Homo sapiens
ANVCGSQQG

SEQ ID NO: 121891 - protein, 9 aa, Homo sapiens
NVCGSQQGR

SEQ ID NO: 121892 - protein, 9 aa, Homo sapiens
VCGSQQGRG

SEQ ID NO: 121893 - protein, 9 aa, Homo sapiens
CGSQQGRGQ

SEQ ID NO: 121894 - protein, 9 aa, Homo sapiens
GSQQGRGQC

SEQ ID NO: 121895 - protein, 9 aa, Homo sapiens
SQQGRGQCT

SEQ ID NO: 121896 - protein, 9 aa, Homo sapiens
QQGRGQCTE

SEQ ID NO: 121897 - protein, 9 aa, Homo sapiens
QGRGQCTEV

SEQ ID NO: 121898 - protein, 9 aa, Homo sapiens
GRGQCTEVR

SEQ ID NO: 121899 - protein, 9 aa, Homo sapiens
RGQCTEVRA

SEQ ID NO: 121900 - protein, 9 aa, Homo sapiens
GQCTEVRAD

SEQ ID NO: 121901 - protein, 9 aa, Homo sapiens
QCTEVRADT

SEQ ID NO: 121902 - protein, 9 aa, Homo sapiens
CTEVRADTR

SEQ ID NO: 121903 - protein, 9 aa, Homo sapiens
TEVRADTRP

SEQ ID NO: 121904 - protein, 9 aa, Homo sapiens
EVRADTRPW

SEQ ID NO: 121905 - protein, 9 aa, Homo sapiens
VRADTRPWS

SEQ ID NO: 121906 - protein, 9 aa, Homo sapiens
RADTRPWSG

SEQ ID NO: 121907 - protein, 9 aa, Homo sapiens
ADTRPWSGP

SEQ ID NO: 121908 - protein, 9 aa, Homo sapiens
DTRPWSGPY

SEQ ID NO: 121909 - protein, 9 aa, Homo sapiens
TRPWSGPYI

SEQ ID NO: 121910 - protein, 9 aa, Homo sapiens
RPWSGPYIL

SEQ ID NO: 121911 - protein, 9 aa, Homo sapiens
PWSGPYILR

SEQ ID NO: 121912 - protein, 9 aa, Homo sapiens
WSGPYILRN

SEQ ID NO: 121913 - protein, 9 aa, Homo sapiens
SGPYILRNQ

SEQ ID NO: 121914 - protein, 9 aa, Homo sapiens
GPYILRNQD

SEQ ID NO: 121915 - protein, 9 aa, Homo sapiens
PYILRNQDD

SEQ ID NO: 121916 - protein, 9 aa, Homo sapiens
YILRNQDDR

SEQ ID NO: 121917 - protein, 9 aa, Homo sapiens
ILRNQDDRE

SEQ ID NO: 121918 - protein, 9 aa, Homo sapiens
LRNQDDREL

SEQ ID NO: 121919 - protein, 9 aa, Homo sapiens
RNQDDRELW

SEQ ID NO: 121920 - protein, 9 aa, Homo sapiens
NQDDRELWP

SEQ ID NO: 121921 - protein, 9 aa, Homo sapiens
QDDRELWPR

SEQ ID NO: 121922 - protein, 9 aa, Homo sapiens
DDRELWPRK

SEQ ID NO: 121923 - protein, 9 aa, Homo sapiens
DRELWPRKF

SEQ ID NO: 121924 - protein, 9 aa, Homo sapiens
RELWPRKFF

SEQ ID NO: 121925 - protein, 9 aa, Homo sapiens
ELWPRKFFH

SEQ ID NO: 121926 - protein, 9 aa, Homo sapiens
LWPRKFFHR

SEQ ID NO: 121927 - protein, 9 aa, Homo sapiens
WPRKFFHRT

SEQ ID NO: 121928 - protein, 9 aa, Homo sapiens
PRKFFHRTC

SEQ ID NO: 121929 - protein, 9 aa, Homo sapiens
RKFFHRTCK

SEQ ID NO: 121930 - protein, 9 aa, Homo sapiens
KFFHRTCKC

SEQ ID NO: 121931 - protein, 9 aa, Homo sapiens
FFHRTCKCT

SEQ ID NO: 121932 - protein, 9 aa, Homo sapiens
MLLTLIILL

SEQ ID NO: 121933 - protein, 9 aa, Homo sapiens
LLTLIILLP

SEQ ID NO: 121934 - protein, 9 aa, Homo sapiens
LTLIILLPV

SEQ ID NO: 121935 - protein, 9 aa, Homo sapiens
TLIILLPVV

SEQ ID NO: 121936 - protein, 9 aa, Homo sapiens
LIILLPVVS

SEQ ID NO: 121937 - protein, 9 aa, Homo sapiens
IILLPVVSK

SEQ ID NO: 121938 - protein, 9 aa, Homo sapiens
ILLPVVSKF

SEQ ID NO: 121939 - protein, 9 aa, Homo sapiens
LLPVVSKFS

SEQ ID NO: 121940 - protein, 9 aa, Homo sapiens
LPVVSKFSF

SEQ ID NO: 121941 - protein, 9 aa, Homo sapiens
PVVSKFSFV

SEQ ID NO: 121942 - protein, 9 aa, Homo sapiens
VVSKFSFVS

SEQ ID NO: 121943 - protein, 9 aa, Homo sapiens
VSKFSFVSL

SEQ ID NO: 121944 - protein, 9 aa, Homo sapiens
SKFSFVSLS

SEQ ID NO: 121945 - protein, 9 aa, Homo sapiens
KFSFVSLSA

SEQ ID NO: 121946 - protein, 9 aa, Homo sapiens
FSFVSLSAP

SEQ ID NO: 121947 - protein, 9 aa, Homo sapiens
SFVSLSAPQ

SEQ ID NO: 121948 - protein, 9 aa, Homo sapiens
FVSLSAPQH

SEQ ID NO: 121949 - protein, 9 aa, Homo sapiens
VSLSAPQHW

SEQ ID NO: 121950 - protein, 9 aa, Homo sapiens
SLSAPQHWS

SEQ ID NO: 121951 - protein, 9 aa, Homo sapiens
LSAPQHWSC

SEQ ID NO: 121952 - protein, 9 aa, Homo sapiens
SAPQHWSCP

SEQ ID NO: 121953 - protein, 9 aa, Homo sapiens
APQHWSCPE

SEQ ID NO: 121954 - protein, 9 aa, Homo sapiens
PQHWSCPEG

SEQ ID NO: 121955 - protein, 9 aa, Homo sapiens
QHWSCPEGT

SEQ ID NO: 121956 - protein, 9 aa, Homo sapiens
HWSCPEGTL

SEQ ID NO: 121957 - protein, 9 aa, Homo sapiens
WSCPEGTLA

SEQ ID NO: 121958 - protein, 9 aa, Homo sapiens
SCPEGTLAG

SEQ ID NO: 121959 - protein, 9 aa, Homo sapiens
CPEGTLAGN

SEQ ID NO: 121960 - protein, 9 aa, Homo sapiens
PEGTLAGNG

SEQ ID NO: 121961 - protein, 9 aa, Homo sapiens
EGTLAGNGN

SEQ ID NO: 121962 - protein, 9 aa, Homo sapiens
GTLAGNGNS

SEQ ID NO: 121963 - protein, 9 aa, Homo sapiens
TLAGNGNST

SEQ ID NO: 121964 - protein, 9 aa, Homo sapiens
LAGNGNSTC

SEQ ID NO: 121965 - protein, 9 aa, Homo sapiens
AGNGNSTCV

SEQ ID NO: 121966 - protein, 9 aa, Homo sapiens
GNGNSTCVG

SEQ ID NO: 121967 - protein, 9 aa, Homo sapiens
NGNSTCVGP

SEQ ID NO: 121968 - protein, 9 aa, Homo sapiens
GNSTCVGPA

SEQ ID NO: 121969 - protein, 9 aa, Homo sapiens
NSTCVGPAP

SEQ ID NO: 121970 - protein, 9 aa, Homo sapiens
STCVGPAPF

SEQ ID NO: 121971 - protein, 9 aa, Homo sapiens
TCVGPAPFL

SEQ ID NO: 121972 - protein, 9 aa, Homo sapiens
CVGPAPFLI

SEQ ID NO: 121973 - protein, 9 aa, Homo sapiens
VGPAPFLIF

SEQ ID NO: 121974 - protein, 9 aa, Homo sapiens
GPAPFLIFS

SEQ ID NO: 121975 - protein, 9 aa, Homo sapiens
PAPFLIFSH

SEQ ID NO: 121976 - protein, 9 aa, Homo sapiens
APFLIFSHG

SEQ ID NO: 121977 - protein, 9 aa, Homo sapiens
PFLIFSHGN

SEQ ID NO: 121978 - protein, 9 aa, Homo sapiens
FLIFSHGNS

SEQ ID NO: 121979 - protein, 9 aa, Homo sapiens
LIFSHGNSI

SEQ ID NO: 121980 - protein, 9 aa, Homo sapiens
IFSHGNSIF

SEQ ID NO: 121981 - protein, 9 aa, Homo sapiens
FSHGNSIFR

SEQ ID NO: 121982 - protein, 9 aa, Homo sapiens
SHGNSIFRI

SEQ ID NO: 121983 - protein, 9 aa, Homo sapiens
HGNSIFRID

SEQ ID NO: 121984 - protein, 9 aa, Homo sapiens
GNSIFRIDT

SEQ ID NO: 121985 - protein, 9 aa, Homo sapiens
NSIFRIDTE

SEQ ID NO: 121986 - protein, 9 aa, Homo sapiens
SIFRIDTEG

SEQ ID NO: 121987 - protein, 9 aa, Homo sapiens
IFRIDTEGT

SEQ ID NO: 121988 - protein, 9 aa, Homo sapiens
FRIDTEGTN

SEQ ID NO: 121989 - protein, 9 aa, Homo sapiens
RIDTEGTNY

SEQ ID NO: 121990 - protein, 9 aa, Homo sapiens
IDTEGTNYE

SEQ ID NO: 121991 - protein, 9 aa, Homo sapiens
DTEGTNYEQ

SEQ ID NO: 121992 - protein, 9 aa, Homo sapiens
TEGTNYEQL

SEQ ID NO: 121993 - protein, 9 aa, Homo sapiens
EGTNYEQLV

SEQ ID NO: 121994 - protein, 9 aa, Homo sapiens
GTNYEQLVV

SEQ ID NO: 121995 - protein, 9 aa, Homo sapiens
TNYEQLVVD

SEQ ID NO: 121996 - protein, 9 aa, Homo sapiens
NYEQLVVDA

SEQ ID NO: 121997 - protein, 9 aa, Homo sapiens
YEQLVVDAG

SEQ ID NO: 121998 - protein, 9 aa, Homo sapiens
EQLVVDAGV

SEQ ID NO: 121999 - protein, 9 aa, Homo sapiens
QLVVDAGVS

SEQ ID NO: 122000 - protein, 9 aa, Homo sapiens
LVVDAGVSV

SEQ ID NO: 122001 - protein, 9 aa, Homo sapiens
VVDAGVSVI

SEQ ID NO: 122002 - protein, 9 aa, Homo sapiens
VDAGVSVIM

SEQ ID NO: 122003 - protein, 9 aa, Homo sapiens
DAGVSVIMD

SEQ ID NO: 122004 - protein, 9 aa, Homo sapiens
AGVSVIMDF

SEQ ID NO: 122005 - protein, 9 aa, Homo sapiens
GVSVIMDFH

SEQ ID NO: 122006 - protein, 9 aa, Homo sapiens
VSVIMDFHY

SEQ ID NO: 122007 - protein, 9 aa, Homo sapiens
SVIMDFHYN

SEQ ID NO: 122008 - protein, 9 aa, Homo sapiens
VIMDFHYNE

SEQ ID NO: 122009 - protein, 9 aa, Homo sapiens
IMDFHYNEK

SEQ ID NO: 122010 - protein, 9 aa, Homo sapiens
MDFHYNEKR

SEQ ID NO: 122011 - protein, 9 aa, Homo sapiens
DFHYNEKRI

SEQ ID NO: 122012 - protein, 9 aa, Homo sapiens
FHYNEKRIY

SEQ ID NO: 122013 - protein, 9 aa, Homo sapiens
HYNEKRIYW

SEQ ID NO: 122014 - protein, 9 aa, Homo sapiens
YNEKRIYWV

SEQ ID NO: 122015 - protein, 9 aa, Homo sapiens
NEKRIYWVD

SEQ ID NO: 122016 - protein, 9 aa, Homo sapiens
EKRIYWVDL

SEQ ID NO: 122017 - protein, 9 aa, Homo sapiens
KRIYWVDLE

SEQ ID NO: 122018 - protein, 9 aa, Homo sapiens
RIYWVDLER

SEQ ID NO: 122019 - protein, 9 aa, Homo sapiens
IYWVDLERQ

SEQ ID NO: 122020 - protein, 9 aa, Homo sapiens
YWVDLERQL

SEQ ID NO: 122021 - protein, 9 aa, Homo sapiens
WVDLERQLL

SEQ ID NO: 122022 - protein, 9 aa, Homo sapiens
VDLERQLLQ

SEQ ID NO: 122023 - protein, 9 aa, Homo sapiens
DLERQLLQR

SEQ ID NO: 122024 - protein, 9 aa, Homo sapiens
LERQLLQRV

SEQ ID NO: 122025 - protein, 9 aa, Homo sapiens
ERQLLQRVF

SEQ ID NO: 122026 - protein, 9 aa, Homo sapiens
RQLLQRVFL

SEQ ID NO: 122027 - protein, 9 aa, Homo sapiens
QLLQRVFLN

SEQ ID NO: 122028 - protein, 9 aa, Homo sapiens
LLQRVFLNG

SEQ ID NO: 122029 - protein, 9 aa, Homo sapiens
LQRVFLNGS

SEQ ID NO: 122030 - protein, 9 aa, Homo sapiens
QRVFLNGSR

SEQ ID NO: 122031 - protein, 9 aa, Homo sapiens
RVFLNGSRQ

SEQ ID NO: 122032 - protein, 9 aa, Homo sapiens
VFLNGSRQE

SEQ ID NO: 122033 - protein, 9 aa, Homo sapiens
FLNGSRQER

SEQ ID NO: 122034 - protein, 9 aa, Homo sapiens
LNGSRQERV

SEQ ID NO: 122035 - protein, 9 aa, Homo sapiens
NGSRQERVC

SEQ ID NO: 122036 - protein, 9 aa, Homo sapiens
GSRQERVCN

SEQ ID NO: 122037 - protein, 9 aa, Homo sapiens
SRQERVCNI

SEQ ID NO: 122038 - protein, 9 aa, Homo sapiens
RQERVCNIE

SEQ ID NO: 122039 - protein, 9 aa, Homo sapiens
QERVCNIEK

SEQ ID NO: 122040 - protein, 9 aa, Homo sapiens
ERVCNIEKN

SEQ ID NO: 122041 - protein, 9 aa, Homo sapiens
RVCNIEKNV

SEQ ID NO: 122042 - protein, 9 aa, Homo sapiens
VCNIEKNVS

SEQ ID NO: 122043 - protein, 9 aa, Homo sapiens
CNIEKNVSG

SEQ ID NO: 122044 - protein, 9 aa, Homo sapiens
NIEKNVSGM

SEQ ID NO: 122045 - protein, 9 aa, Homo sapiens
IEKNVSGMA

SEQ ID NO: 122046 - protein, 9 aa, Homo sapiens
EKNVSGMAI

SEQ ID NO: 122047 - protein, 9 aa, Homo sapiens
KNVSGMAIN

SEQ ID NO: 122048 - protein, 9 aa, Homo sapiens
NVSGMAINW

SEQ ID NO: 122049 - protein, 9 aa, Homo sapiens
VSGMAINWI

SEQ ID NO: 122050 - protein, 9 aa, Homo sapiens
SGMAINWIN

SEQ ID NO: 122051 - protein, 9 aa, Homo sapiens
GMAINWINE

SEQ ID NO: 122052 - protein, 9 aa, Homo sapiens
MAINWINEE

SEQ ID NO: 122053 - protein, 9 aa, Homo sapiens
AINWINEEV

SEQ ID NO: 122054 - protein, 9 aa, Homo sapiens
INWINEEVI

SEQ ID NO: 122055 - protein, 9 aa, Homo sapiens
NWINEEVIW

SEQ ID NO: 122056 - protein, 9 aa, Homo sapiens
WINEEVIWS

SEQ ID NO: 122057 - protein, 9 aa, Homo sapiens
INEEVIWSN

SEQ ID NO: 122058 - protein, 9 aa, Homo sapiens
NEEVIWSNQ

SEQ ID NO: 122059 - protein, 9 aa, Homo sapiens
EEVIWSNQQ

SEQ ID NO: 122060 - protein, 9 aa, Homo sapiens
EVIWSNQQE

SEQ ID NO: 122061 - protein, 9 aa, Homo sapiens
VIWSNQQEG

SEQ ID NO: 122062 - protein, 9 aa, Homo sapiens
IWSNQQEGI

SEQ ID NO: 122063 - protein, 9 aa, Homo sapiens
WSNQQEGII

SEQ ID NO: 122064 - protein, 9 aa, Homo sapiens
SNQQEGIIT

SEQ ID NO: 122065 - protein, 9 aa, Homo sapiens
NQQEGIITV

SEQ ID NO: 122066 - protein, 9 aa, Homo sapiens
QQEGIITVT

SEQ ID NO: 122067 - protein, 9 aa, Homo sapiens
QEGIITVTD

SEQ ID NO: 122068 - protein, 9 aa, Homo sapiens
EGIITVTDM

SEQ ID NO: 122069 - protein, 9 aa, Homo sapiens
GIITVTDMK

SEQ ID NO: 122070 - protein, 9 aa, Homo sapiens
IITVTDMKG

SEQ ID NO: 122071 - protein, 9 aa, Homo sapiens
ITVTDMKGN

SEQ ID NO: 122072 - protein, 9 aa, Homo sapiens
TVTDMKGNN

SEQ ID NO: 122073 - protein, 9 aa, Homo sapiens
VTDMKGNNS

SEQ ID NO: 122074 - protein, 9 aa, Homo sapiens
TDMKGNNSH

SEQ ID NO: 122075 - protein, 9 aa, Homo sapiens
DMKGNNSHI

SEQ ID NO: 122076 - protein, 9 aa, Homo sapiens
MKGNNSHIL

SEQ ID NO: 122077 - protein, 9 aa, Homo sapiens
KGNNSHILL

SEQ ID NO: 122078 - protein, 9 aa, Homo sapiens
GNNSHILLS

SEQ ID NO: 122079 - protein, 9 aa, Homo sapiens
NNSHILLSA

SEQ ID NO: 122080 - protein, 9 aa, Homo sapiens
NSHILLSAL

SEQ ID NO: 122081 - protein, 9 aa, Homo sapiens
SHILLSALK

SEQ ID NO: 122082 - protein, 9 aa, Homo sapiens
HILLSALKY

SEQ ID NO: 122083 - protein, 9 aa, Homo sapiens
ILLSALKYP

SEQ ID NO: 122084 - protein, 9 aa, Homo sapiens
LLSALKYPA

SEQ ID NO: 122085 - protein, 9 aa, Homo sapiens
LSALKYPAN

SEQ ID NO: 122086 - protein, 9 aa, Homo sapiens
SALKYPANV

SEQ ID NO: 122087 - protein, 9 aa, Homo sapiens
ALKYPANVA

SEQ ID NO: 122088 - protein, 9 aa, Homo sapiens
LKYPANVAV

SEQ ID NO: 122089 - protein, 9 aa, Homo sapiens
KYPANVAVD

SEQ ID NO: 122090 - protein, 9 aa, Homo sapiens
YPANVAVDP

SEQ ID NO: 122091 - protein, 9 aa, Homo sapiens
PANVAVDPV

SEQ ID NO: 122092 - protein, 9 aa, Homo sapiens
ANVAVDPVE

SEQ ID NO: 122093 - protein, 9 aa, Homo sapiens
NVAVDPVER

SEQ ID NO: 122094 - protein, 9 aa, Homo sapiens
VAVDPVERF

SEQ ID NO: 122095 - protein, 9 aa, Homo sapiens
AVDPVERFI

SEQ ID NO: 122096 - protein, 9 aa, Homo sapiens
VDPVERFIF

SEQ ID NO: 122097 - protein, 9 aa, Homo sapiens
DPVERFIFW

SEQ ID NO: 122098 - protein, 9 aa, Homo sapiens
PVERFIFWS

SEQ ID NO: 122099 - protein, 9 aa, Homo sapiens
VERFIFWSS

SEQ ID NO: 122100 - protein, 9 aa, Homo sapiens
ERFIFWSSE

SEQ ID NO: 122101 - protein, 9 aa, Homo sapiens
RFIFWSSEV

SEQ ID NO: 122102 - protein, 9 aa, Homo sapiens
FIFWSSEVA

SEQ ID NO: 122103 - protein, 9 aa, Homo sapiens
IFWSSEVAG

SEQ ID NO: 122104 - protein, 9 aa, Homo sapiens
FWSSEVAGS

SEQ ID NO: 122105 - protein, 9 aa, Homo sapiens
WSSEVAGSL

SEQ ID NO: 122106 - protein, 9 aa, Homo sapiens
SSEVAGSLY

SEQ ID NO: 122107 - protein, 9 aa, Homo sapiens
SEVAGSLYR

SEQ ID NO: 122108 - protein, 9 aa, Homo sapiens
EVAGSLYRA

SEQ ID NO: 122109 - protein, 9 aa, Homo sapiens
VAGSLYRAD

SEQ ID NO: 122110 - protein, 9 aa, Homo sapiens
AGSLYRADL

SEQ ID NO: 122111 - protein, 9 aa, Homo sapiens
GSLYRADLD

SEQ ID NO: 122112 - protein, 9 aa, Homo sapiens
SLYRADLDG

SEQ ID NO: 122113 - protein, 9 aa, Homo sapiens
LYRADLDGV

SEQ ID NO: 122114 - protein, 9 aa, Homo sapiens
YRADLDGVG

SEQ ID NO: 122115 - protein, 9 aa, Homo sapiens
RADLDGVGV

SEQ ID NO: 122116 - protein, 9 aa, Homo sapiens
ADLDGVGVK

SEQ ID NO: 122117 - protein, 9 aa, Homo sapiens
DLDGVGVKA

SEQ ID NO: 122118 - protein, 9 aa, Homo sapiens
LDGVGVKAL

SEQ ID NO: 122119 - protein, 9 aa, Homo sapiens
DGVGVKALL

SEQ ID NO: 122120 - protein, 9 aa, Homo sapiens
GVGVKALLE

SEQ ID NO: 122121 - protein, 9 aa, Homo sapiens
VGVKALLET

SEQ ID NO: 122122 - protein, 9 aa, Homo sapiens
GVKALLETS

SEQ ID NO: 122123 - protein, 9 aa, Homo sapiens
VKALLETSE

SEQ ID NO: 122124 - protein, 9 aa, Homo sapiens
KALLETSEK

SEQ ID NO: 122125 - protein, 9 aa, Homo sapiens
ALLETSEKI

SEQ ID NO: 122126 - protein, 9 aa, Homo sapiens
LLETSEKIT

SEQ ID NO: 122127 - protein, 9 aa, Homo sapiens
LETSEKITA

SEQ ID NO: 122128 - protein, 9 aa, Homo sapiens
ETSEKITAV

SEQ ID NO: 122129 - protein, 9 aa, Homo sapiens
TSEKITAVS

SEQ ID NO: 122130 - protein, 9 aa, Homo sapiens
SEKITAVSL

SEQ ID NO: 122131 - protein, 9 aa, Homo sapiens
EKITAVSLD

SEQ ID NO: 122132 - protein, 9 aa, Homo sapiens
KITAVSLDV

SEQ ID NO: 122133 - protein, 9 aa, Homo sapiens
ITAVSLDVL

SEQ ID NO: 122134 - protein, 9 aa, Homo sapiens
TAVSLDVLD

SEQ ID NO: 122135 - protein, 9 aa, Homo sapiens
AVSLDVLDK

SEQ ID NO: 122136 - protein, 9 aa, Homo sapiens
VSLDVLDKR

SEQ ID NO: 122137 - protein, 9 aa, Homo sapiens
SLDVLDKRL

SEQ ID NO: 122138 - protein, 9 aa, Homo sapiens
LDVLDKRLF

SEQ ID NO: 122139 - protein, 9 aa, Homo sapiens
DVLDKRLFW

SEQ ID NO: 122140 - protein, 9 aa, Homo sapiens
VLDKRLFWI

SEQ ID NO: 122141 - protein, 9 aa, Homo sapiens
LDKRLFWIQ

SEQ ID NO: 122142 - protein, 9 aa, Homo sapiens
DKRLFWIQY

SEQ ID NO: 122143 - protein, 9 aa, Homo sapiens
KRLFWIQYN

SEQ ID NO: 122144 - protein, 9 aa, Homo sapiens
RLFWIQYNR

SEQ ID NO: 122145 - protein, 9 aa, Homo sapiens
LFWIQYNRE

SEQ ID NO: 122146 - protein, 9 aa, Homo sapiens
FWIQYNREG

SEQ ID NO: 122147 - protein, 9 aa, Homo sapiens
WIQYNREGS

SEQ ID NO: 122148 - protein, 9 aa, Homo sapiens
IQYNREGSN

SEQ ID NO: 122149 - protein, 9 aa, Homo sapiens
QYNREGSNS

SEQ ID NO: 122150 - protein, 9 aa, Homo sapiens
YNREGSNSL

SEQ ID NO: 122151 - protein, 9 aa, Homo sapiens
NREGSNSLI

SEQ ID NO: 122152 - protein, 9 aa, Homo sapiens
REGSNSLIC

SEQ ID NO: 122153 - protein, 9 aa, Homo sapiens
EGSNSLICS

SEQ ID NO: 122154 - protein, 9 aa, Homo sapiens
GSNSLICSC

SEQ ID NO: 122155 - protein, 9 aa, Homo sapiens
SNSLICSCD

SEQ ID NO: 122156 - protein, 9 aa, Homo sapiens
NSLICSCDY

SEQ ID NO: 122157 - protein, 9 aa, Homo sapiens
SLICSCDYD

SEQ ID NO: 122158 - protein, 9 aa, Homo sapiens
LICSCDYDG

SEQ ID NO: 122159 - protein, 9 aa, Homo sapiens
ICSCDYDGG

SEQ ID NO: 122160 - protein, 9 aa, Homo sapiens
CSCDYDGGS

SEQ ID NO: 122161 - protein, 9 aa, Homo sapiens
SCDYDGGSV

SEQ ID NO: 122162 - protein, 9 aa, Homo sapiens
CDYDGGSVH

SEQ ID NO: 122163 - protein, 9 aa, Homo sapiens
DYDGGSVHI

SEQ ID NO: 122164 - protein, 9 aa, Homo sapiens
YDGGSVHIS

SEQ ID NO: 122165 - protein, 9 aa, Homo sapiens
DGGSVHISK

SEQ ID NO: 122166 - protein, 9 aa, Homo sapiens
GGSVHISKH

SEQ ID NO: 122167 - protein, 9 aa, Homo sapiens
GSVHISKHP

SEQ ID NO: 122168 - protein, 9 aa, Homo sapiens
SVHISKHPT

SEQ ID NO: 122169 - protein, 9 aa, Homo sapiens
VHISKHPTQ

SEQ ID NO: 122170 - protein, 9 aa, Homo sapiens
HISKHPTQH

SEQ ID NO: 122171 - protein, 9 aa, Homo sapiens
ISKHPTQHN

SEQ ID NO: 122172 - protein, 9 aa, Homo sapiens
SKHPTQHNL

SEQ ID NO: 122173 - protein, 9 aa, Homo sapiens
KHPTQHNLF

SEQ ID NO: 122174 - protein, 9 aa, Homo sapiens
HPTQHNLFA

SEQ ID NO: 122175 - protein, 9 aa, Homo sapiens
PTQHNLFAM

SEQ ID NO: 122176 - protein, 9 aa, Homo sapiens
TQHNLFAMS

SEQ ID NO: 122177 - protein, 9 aa, Homo sapiens
QHNLFAMSL

SEQ ID NO: 122178 - protein, 9 aa, Homo sapiens
HNLFAMSLF

SEQ ID NO: 122179 - protein, 9 aa, Homo sapiens
NLFAMSLFG

SEQ ID NO: 122180 - protein, 9 aa, Homo sapiens
LFAMSLFGD

SEQ ID NO: 122181 - protein, 9 aa, Homo sapiens
FAMSLFGDR

SEQ ID NO: 122182 - protein, 9 aa, Homo sapiens
AMSLFGDRI

SEQ ID NO: 122183 - protein, 9 aa, Homo sapiens
MSLFGDRIF

SEQ ID NO: 122184 - protein, 9 aa, Homo sapiens
SLFGDRIFY

SEQ ID NO: 122185 - protein, 9 aa, Homo sapiens
LFGDRIFYS

SEQ ID NO: 122186 - protein, 9 aa, Homo sapiens
FGDRIFYST

SEQ ID NO: 122187 - protein, 9 aa, Homo sapiens
GDRIFYSTW

SEQ ID NO: 122188 - protein, 9 aa, Homo sapiens
DRIFYSTWK

SEQ ID NO: 122189 - protein, 9 aa, Homo sapiens
RIFYSTWKM

SEQ ID NO: 122190 - protein, 9 aa, Homo sapiens
IFYSTWKMK

SEQ ID NO: 122191 - protein, 9 aa, Homo sapiens
FYSTWKMKT

SEQ ID NO: 122192 - protein, 9 aa, Homo sapiens
YSTWKMKTI

SEQ ID NO: 122193 - protein, 9 aa, Homo sapiens
STWKMKTIW

SEQ ID NO: 122194 - protein, 9 aa, Homo sapiens
TWKMKTIWI

SEQ ID NO: 122195 - protein, 9 aa, Homo sapiens
WKMKTIWIA

SEQ ID NO: 122196 - protein, 9 aa, Homo sapiens
KMKTIWIAN

SEQ ID NO: 122197 - protein, 9 aa, Homo sapiens
MKTIWIANK

SEQ ID NO: 122198 - protein, 9 aa, Homo sapiens
KTIWIANKH

SEQ ID NO: 122199 - protein, 9 aa, Homo sapiens
TIWIANKHT

SEQ ID NO: 122200 - protein, 9 aa, Homo sapiens
IWIANKHTG

SEQ ID NO: 122201 - protein, 9 aa, Homo sapiens
WIANKHTGK

SEQ ID NO: 122202 - protein, 9 aa, Homo sapiens
IANKHTGKD

SEQ ID NO: 122203 - protein, 9 aa, Homo sapiens
ANKHTGKDM

SEQ ID NO: 122204 - protein, 9 aa, Homo sapiens
NKHTGKDMV

SEQ ID NO: 122205 - protein, 9 aa, Homo sapiens
KHTGKDMVR

SEQ ID NO: 122206 - protein, 9 aa, Homo sapiens
HTGKDMVRI

SEQ ID NO: 122207 - protein, 9 aa, Homo sapiens
TGKDMVRIN

SEQ ID NO: 122208 - protein, 9 aa, Homo sapiens
GKDMVRINL

SEQ ID NO: 122209 - protein, 9 aa, Homo sapiens
KDMVRINLH

SEQ ID NO: 122210 - protein, 9 aa, Homo sapiens
DMVRINLHS

SEQ ID NO: 122211 - protein, 9 aa, Homo sapiens
MVRINLHSS

SEQ ID NO: 122212 - protein, 9 aa, Homo sapiens
VRINLHSSF

SEQ ID NO: 122213 - protein, 9 aa, Homo sapiens
RINLHSSFV

SEQ ID NO: 122214 - protein, 9 aa, Homo sapiens
INLHSSFVP

SEQ ID NO: 122215 - protein, 9 aa, Homo sapiens
NLHSSFVPL

SEQ ID NO: 122216 - protein, 9 aa, Homo sapiens
LHSSFVPLG

SEQ ID NO: 122217 - protein, 9 aa, Homo sapiens
HSSFVPLGE

SEQ ID NO: 122218 - protein, 9 aa, Homo sapiens
SSFVPLGEL

SEQ ID NO: 122219 - protein, 9 aa, Homo sapiens
SFVPLGELK

SEQ ID NO: 122220 - protein, 9 aa, Homo sapiens
FVPLGELKV

SEQ ID NO: 122221 - protein, 9 aa, Homo sapiens
VPLGELKVV

SEQ ID NO: 122222 - protein, 9 aa, Homo sapiens
PLGELKVVH

SEQ ID NO: 122223 - protein, 9 aa, Homo sapiens
LGELKVVHP

SEQ ID NO: 122224 - protein, 9 aa, Homo sapiens
GELKVVHPL

SEQ ID NO: 122225 - protein, 9 aa, Homo sapiens
ELKVVHPLA

SEQ ID NO: 122226 - protein, 9 aa, Homo sapiens
LKVVHPLAQ

SEQ ID NO: 122227 - protein, 9 aa, Homo sapiens
KVVHPLAQP

SEQ ID NO: 122228 - protein, 9 aa, Homo sapiens
VVHPLAQPK

SEQ ID NO: 122229 - protein, 9 aa, Homo sapiens
VHPLAQPKA

SEQ ID NO: 122230 - protein, 9 aa, Homo sapiens
HPLAQPKAE

SEQ ID NO: 122231 - protein, 9 aa, Homo sapiens
PLAQPKAED

SEQ ID NO: 122232 - protein, 9 aa, Homo sapiens
LAQPKAEDD

SEQ ID NO: 122233 - protein, 9 aa, Homo sapiens
AQPKAEDDT

SEQ ID NO: 122234 - protein, 9 aa, Homo sapiens
QPKAEDDTW

SEQ ID NO: 122235 - protein, 9 aa, Homo sapiens
PKAEDDTWE

SEQ ID NO: 122236 - protein, 9 aa, Homo sapiens
KAEDDTWEP

SEQ ID NO: 122237 - protein, 9 aa, Homo sapiens
AEDDTWEPE

SEQ ID NO: 122238 - protein, 9 aa, Homo sapiens
EDDTWEPEQ

SEQ ID NO: 122239 - protein, 9 aa, Homo sapiens
DDTWEPEQK

SEQ ID NO: 122240 - protein, 9 aa, Homo sapiens
DTWEPEQKL

SEQ ID NO: 122241 - protein, 9 aa, Homo sapiens
TWEPEQKLC

SEQ ID NO: 122242 - protein, 9 aa, Homo sapiens
WEPEQKLCK

SEQ ID NO: 122243 - protein, 9 aa, Homo sapiens
EPEQKLCKL

SEQ ID NO: 122244 - protein, 9 aa, Homo sapiens
PEQKLCKLR

SEQ ID NO: 122245 - protein, 9 aa, Homo sapiens
EQKLCKLRK

SEQ ID NO: 122246 - protein, 9 aa, Homo sapiens
QKLCKLRKG

SEQ ID NO: 122247 - protein, 9 aa, Homo sapiens
KLCKLRKGN

SEQ ID NO: 122248 - protein, 9 aa, Homo sapiens
LCKLRKGNC

SEQ ID NO: 122249 - protein, 9 aa, Homo sapiens
CKLRKGNCS

SEQ ID NO: 122250 - protein, 9 aa, Homo sapiens
KLRKGNCSS

SEQ ID NO: 122251 - protein, 9 aa, Homo sapiens
LRKGNCSST

SEQ ID NO: 122252 - protein, 9 aa, Homo sapiens
RKGNCSSTV

SEQ ID NO: 122253 - protein, 9 aa, Homo sapiens
KGNCSSTVC

SEQ ID NO: 122254 - protein, 9 aa, Homo sapiens
GNCSSTVCG

SEQ ID NO: 122255 - protein, 9 aa, Homo sapiens
NCSSTVCGQ

SEQ ID NO: 122256 - protein, 9 aa, Homo sapiens
CSSTVCGQD

SEQ ID NO: 122257 - protein, 9 aa, Homo sapiens
SSTVCGQDL

SEQ ID NO: 122258 - protein, 9 aa, Homo sapiens
STVCGQDLQ

SEQ ID NO: 122259 - protein, 9 aa, Homo sapiens
TVCGQDLQS

SEQ ID NO: 122260 - protein, 9 aa, Homo sapiens
VCGQDLQSH

SEQ ID NO: 122261 - protein, 9 aa, Homo sapiens
CGQDLQSHL

SEQ ID NO: 122262 - protein, 9 aa, Homo sapiens
GQDLQSHLC

SEQ ID NO: 122263 - protein, 9 aa, Homo sapiens
QDLQSHLCM

SEQ ID NO: 122264 - protein, 9 aa, Homo sapiens
DLQSHLCMC

SEQ ID NO: 122265 - protein, 9 aa, Homo sapiens
LQSHLCMCA

SEQ ID NO: 122266 - protein, 9 aa, Homo sapiens
QSHLCMCAE

SEQ ID NO: 122267 - protein, 9 aa, Homo sapiens
SHLCMCAEG

SEQ ID NO: 122268 - protein, 9 aa, Homo sapiens
HLCMCAEGY

SEQ ID NO: 122269 - protein, 9 aa, Homo sapiens
LCMCAEGYA

SEQ ID NO: 122270 - protein, 9 aa, Homo sapiens
CMCAEGYAL

SEQ ID NO: 122271 - protein, 9 aa, Homo sapiens
MCAEGYALS

SEQ ID NO: 122272 - protein, 9 aa, Homo sapiens
CAEGYALSR

SEQ ID NO: 122273 - protein, 9 aa, Homo sapiens
AEGYALSRD

SEQ ID NO: 122274 - protein, 9 aa, Homo sapiens
EGYALSRDR

SEQ ID NO: 122275 - protein, 9 aa, Homo sapiens
GYALSRDRK

SEQ ID NO: 122276 - protein, 9 aa, Homo sapiens
YALSRDRKY

SEQ ID NO: 122277 - protein, 9 aa, Homo sapiens
ALSRDRKYC

SEQ ID NO: 122278 - protein, 9 aa, Homo sapiens
LSRDRKYCE

SEQ ID NO: 122279 - protein, 9 aa, Homo sapiens
SRDRKYCED

SEQ ID NO: 122280 - protein, 9 aa, Homo sapiens
RDRKYCEDV

SEQ ID NO: 122281 - protein, 9 aa, Homo sapiens
DRKYCEDVN

SEQ ID NO: 122282 - protein, 9 aa, Homo sapiens
RKYCEDVNE

SEQ ID NO: 122283 - protein, 9 aa, Homo sapiens
KYCEDVNEC

SEQ ID NO: 122284 - protein, 9 aa, Homo sapiens
YCEDVNECA

SEQ ID NO: 122285 - protein, 9 aa, Homo sapiens
CEDVNECAF

SEQ ID NO: 122286 - protein, 9 aa, Homo sapiens
EDVNECAFW

SEQ ID NO: 122287 - protein, 9 aa, Homo sapiens
DVNECAFWN

SEQ ID NO: 122288 - protein, 9 aa, Homo sapiens
VNECAFWNH

SEQ ID NO: 122289 - protein, 9 aa, Homo sapiens
NECAFWNHG

SEQ ID NO: 122290 - protein, 9 aa, Homo sapiens
ECAFWNHGC

SEQ ID NO: 122291 - protein, 9 aa, Homo sapiens
CAFWNHGCT

SEQ ID NO: 122292 - protein, 9 aa, Homo sapiens
AFWNHGCTL

SEQ ID NO: 122293 - protein, 9 aa, Homo sapiens
FWNHGCTLG

SEQ ID NO: 122294 - protein, 9 aa, Homo sapiens
WNHGCTLGC

SEQ ID NO: 122295 - protein, 9 aa, Homo sapiens
NHGCTLGCK

SEQ ID NO: 122296 - protein, 9 aa, Homo sapiens
HGCTLGCKN

SEQ ID NO: 122297 - protein, 9 aa, Homo sapiens
GCTLGCKNT

SEQ ID NO: 122298 - protein, 9 aa, Homo sapiens
CTLGCKNTP

SEQ ID NO: 122299 - protein, 9 aa, Homo sapiens
TLGCKNTPG

SEQ ID NO: 122300 - protein, 9 aa, Homo sapiens
LGCKNTPGS

SEQ ID NO: 122301 - protein, 9 aa, Homo sapiens
GCKNTPGSY

SEQ ID NO: 122302 - protein, 9 aa, Homo sapiens
CKNTPGSYY

SEQ ID NO: 122303 - protein, 9 aa, Homo sapiens
KNTPGSYYC

SEQ ID NO: 122304 - protein, 9 aa, Homo sapiens
NTPGSYYCT

SEQ ID NO: 122305 - protein, 9 aa, Homo sapiens
TPGSYYCTC

SEQ ID NO: 122306 - protein, 9 aa, Homo sapiens
PGSYYCTCP

SEQ ID NO: 122307 - protein, 9 aa, Homo sapiens
GSYYCTCPV

SEQ ID NO: 122308 - protein, 9 aa, Homo sapiens
SYYCTCPVG

SEQ ID NO: 122309 - protein, 9 aa, Homo sapiens
YYCTCPVGF

SEQ ID NO: 122310 - protein, 9 aa, Homo sapiens
YCTCPVGFV

SEQ ID NO: 122311 - protein, 9 aa, Homo sapiens
CTCPVGFVL

SEQ ID NO: 122312 - protein, 9 aa, Homo sapiens
TCPVGFVLL

SEQ ID NO: 122313 - protein, 9 aa, Homo sapiens
CPVGFVLLP

SEQ ID NO: 122314 - protein, 9 aa, Homo sapiens
PVGFVLLPD

SEQ ID NO: 122315 - protein, 9 aa, Homo sapiens
VGFVLLPDG

SEQ ID NO: 122316 - protein, 9 aa, Homo sapiens
GFVLLPDGK

SEQ ID NO: 122317 - protein, 9 aa, Homo sapiens
FVLLPDGKR

SEQ ID NO: 122318 - protein, 9 aa, Homo sapiens
VLLPDGKRC

SEQ ID NO: 122319 - protein, 9 aa, Homo sapiens
LLPDGKRCH

SEQ ID NO: 122320 - protein, 9 aa, Homo sapiens
LPDGKRCHQ

SEQ ID NO: 122321 - protein, 9 aa, Homo sapiens
PDGKRCHQL

SEQ ID NO: 122322 - protein, 9 aa, Homo sapiens
DGKRCHQLV

SEQ ID NO: 122323 - protein, 9 aa, Homo sapiens
GKRCHQLVS

SEQ ID NO: 122324 - protein, 9 aa, Homo sapiens
KRCHQLVSC

SEQ ID NO: 122325 - protein, 9 aa, Homo sapiens
RCHQLVSCP

SEQ ID NO: 122326 - protein, 9 aa, Homo sapiens
CHQLVSCPR

SEQ ID NO: 122327 - protein, 9 aa, Homo sapiens
HQLVSCPRN

SEQ ID NO: 122328 - protein, 9 aa, Homo sapiens
QLVSCPRNV

SEQ ID NO: 122329 - protein, 9 aa, Homo sapiens
LVSCPRNVS

SEQ ID NO: 122330 - protein, 9 aa, Homo sapiens
VSCPRNVSE

SEQ ID NO: 122331 - protein, 9 aa, Homo sapiens
SCPRNVSEC

SEQ ID NO: 122332 - protein, 9 aa, Homo sapiens
CPRNVSECS

SEQ ID NO: 122333 - protein, 9 aa, Homo sapiens
PRNVSECSH

SEQ ID NO: 122334 - protein, 9 aa, Homo sapiens
RNVSECSHD

SEQ ID NO: 122335 - protein, 9 aa, Homo sapiens
NVSECSHDC

SEQ ID NO: 122336 - protein, 9 aa, Homo sapiens
VSECSHDCV

SEQ ID NO: 122337 - protein, 9 aa, Homo sapiens
SECSHDCVL

SEQ ID NO: 122338 - protein, 9 aa, Homo sapiens
ECSHDCVLT

SEQ ID NO: 122339 - protein, 9 aa, Homo sapiens
CSHDCVLTS

SEQ ID NO: 122340 - protein, 9 aa, Homo sapiens
SHDCVLTSE

SEQ ID NO: 122341 - protein, 9 aa, Homo sapiens
HDCVLTSEG

SEQ ID NO: 122342 - protein, 9 aa, Homo sapiens
DCVLTSEGP

SEQ ID NO: 122343 - protein, 9 aa, Homo sapiens
CVLTSEGPL

SEQ ID NO: 122344 - protein, 9 aa, Homo sapiens
VLTSEGPLC

SEQ ID NO: 122345 - protein, 9 aa, Homo sapiens
LTSEGPLCF

SEQ ID NO: 122346 - protein, 9 aa, Homo sapiens
TSEGPLCFC

SEQ ID NO: 122347 - protein, 9 aa, Homo sapiens
SEGPLCFCP

SEQ ID NO: 122348 - protein, 9 aa, Homo sapiens
EGPLCFCPE

SEQ ID NO: 122349 - protein, 9 aa, Homo sapiens
GPLCFCPEG

SEQ ID NO: 122350 - protein, 9 aa, Homo sapiens
PLCFCPEGS

SEQ ID NO: 122351 - protein, 9 aa, Homo sapiens
LCFCPEGSV

SEQ ID NO: 122352 - protein, 9 aa, Homo sapiens
CFCPEGSVL

SEQ ID NO: 122353 - protein, 9 aa, Homo sapiens
FCPEGSVLE

SEQ ID NO: 122354 - protein, 9 aa, Homo sapiens
CPEGSVLER

SEQ ID NO: 122355 - protein, 9 aa, Homo sapiens
PEGSVLERD

SEQ ID NO: 122356 - protein, 9 aa, Homo sapiens
EGSVLERDG

SEQ ID NO: 122357 - protein, 9 aa, Homo sapiens
GSVLERDGK

SEQ ID NO: 122358 - protein, 9 aa, Homo sapiens
SVLERDGKT

SEQ ID NO: 122359 - protein, 9 aa, Homo sapiens
VLERDGKTC

SEQ ID NO: 122360 - protein, 9 aa, Homo sapiens
LERDGKTCS

SEQ ID NO: 122361 - protein, 9 aa, Homo sapiens
ERDGKTCSG

SEQ ID NO: 122362 - protein, 9 aa, Homo sapiens
RDGKTCSGC

SEQ ID NO: 122363 - protein, 9 aa, Homo sapiens
DGKTCSGCS

SEQ ID NO: 122364 - protein, 9 aa, Homo sapiens
GKTCSGCSS

SEQ ID NO: 122365 - protein, 9 aa, Homo sapiens
KTCSGCSSP

SEQ ID NO: 122366 - protein, 9 aa, Homo sapiens
TCSGCSSPD

SEQ ID NO: 122367 - protein, 9 aa, Homo sapiens
CSGCSSPDN

SEQ ID NO: 122368 - protein, 9 aa, Homo sapiens
SGCSSPDNG

SEQ ID NO: 122369 - protein, 9 aa, Homo sapiens
GCSSPDNGG

SEQ ID NO: 122370 - protein, 9 aa, Homo sapiens
CSSPDNGGC

SEQ ID NO: 122371 - protein, 9 aa, Homo sapiens
SSPDNGGCS

SEQ ID NO: 122372 - protein, 9 aa, Homo sapiens
SPDNGGCSQ

SEQ ID NO: 122373 - protein, 9 aa, Homo sapiens
PDNGGCSQL

SEQ ID NO: 122374 - protein, 9 aa, Homo sapiens
DNGGCSQLC

SEQ ID NO: 122375 - protein, 9 aa, Homo sapiens
NGGCSQLCV

SEQ ID NO: 122376 - protein, 9 aa, Homo sapiens
GGCSQLCVP

SEQ ID NO: 122377 - protein, 9 aa, Homo sapiens
GCSQLCVPL

SEQ ID NO: 122378 - protein, 9 aa, Homo sapiens
CSQLCVPLS

SEQ ID NO: 122379 - protein, 9 aa, Homo sapiens
SQLCVPLSP

SEQ ID NO: 122380 - protein, 9 aa, Homo sapiens
QLCVPLSPV

SEQ ID NO: 122381 - protein, 9 aa, Homo sapiens
LCVPLSPVS

SEQ ID NO: 122382 - protein, 9 aa, Homo sapiens
CVPLSPVSW

SEQ ID NO: 122383 - protein, 9 aa, Homo sapiens
VPLSPVSWE

SEQ ID NO: 122384 - protein, 9 aa, Homo sapiens
PLSPVSWEC

SEQ ID NO: 122385 - protein, 9 aa, Homo sapiens
LSPVSWECD

SEQ ID NO: 122386 - protein, 9 aa, Homo sapiens
SPVSWECDC

SEQ ID NO: 122387 - protein, 9 aa, Homo sapiens
PVSWECDCF

SEQ ID NO: 122388 - protein, 9 aa, Homo sapiens
VSWECDCFP

SEQ ID NO: 122389 - protein, 9 aa, Homo sapiens
SWECDCFPG

SEQ ID NO: 122390 - protein, 9 aa, Homo sapiens
WECDCFPGY

SEQ ID NO: 122391 - protein, 9 aa, Homo sapiens
ECDCFPGYD

SEQ ID NO: 122392 - protein, 9 aa, Homo sapiens
CDCFPGYDL

SEQ ID NO: 122393 - protein, 9 aa, Homo sapiens
DCFPGYDLQ

SEQ ID NO: 122394 - protein, 9 aa, Homo sapiens
CFPGYDLQL

SEQ ID NO: 122395 - protein, 9 aa, Homo sapiens
FPGYDLQLD

SEQ ID NO: 122396 - protein, 9 aa, Homo sapiens
PGYDLQLDE

SEQ ID NO: 122397 - protein, 9 aa, Homo sapiens
GYDLQLDEK

SEQ ID NO: 122398 - protein, 9 aa, Homo sapiens
YDLQLDEKS

SEQ ID NO: 122399 - protein, 9 aa, Homo sapiens
DLQLDEKSC

SEQ ID NO: 122400 - protein, 9 aa, Homo sapiens
LQLDEKSCA

SEQ ID NO: 122401 - protein, 9 aa, Homo sapiens
QLDEKSCAA

SEQ ID NO: 122402 - protein, 9 aa, Homo sapiens
LDEKSCAAS

SEQ ID NO: 122403 - protein, 9 aa, Homo sapiens
DEKSCAASG

SEQ ID NO: 122404 - protein, 9 aa, Homo sapiens
EKSCAASGP

SEQ ID NO: 122405 - protein, 9 aa, Homo sapiens
KSCAASGPQ

SEQ ID NO: 122406 - protein, 9 aa, Homo sapiens
SCAASGPQP

SEQ ID NO: 122407 - protein, 9 aa, Homo sapiens
CAASGPQPF

SEQ ID NO: 122408 - protein, 9 aa, Homo sapiens
AASGPQPFL

SEQ ID NO: 122409 - protein, 9 aa, Homo sapiens
ASGPQPFLL

SEQ ID NO: 122410 - protein, 9 aa, Homo sapiens
SGPQPFLLF

SEQ ID NO: 122411 - protein, 9 aa, Homo sapiens
GPQPFLLFA

SEQ ID NO: 122412 - protein, 9 aa, Homo sapiens
PQPFLLFAN

SEQ ID NO: 122413 - protein, 9 aa, Homo sapiens
QPFLLFANS

SEQ ID NO: 122414 - protein, 9 aa, Homo sapiens
PFLLFANSQ

SEQ ID NO: 122415 - protein, 9 aa, Homo sapiens
FLLFANSQD

SEQ ID NO: 122416 - protein, 9 aa, Homo sapiens
LLFANSQDI

SEQ ID NO: 122417 - protein, 9 aa, Homo sapiens
LFANSQDIR

SEQ ID NO: 122418 - protein, 9 aa, Homo sapiens
FANSQDIRH

SEQ ID NO: 122419 - protein, 9 aa, Homo sapiens
ANSQDIRHM

SEQ ID NO: 122420 - protein, 9 aa, Homo sapiens
NSQDIRHMH

SEQ ID NO: 122421 - protein, 9 aa, Homo sapiens
SQDIRHMHF

SEQ ID NO: 122422 - protein, 9 aa, Homo sapiens
QDIRHMHFD

SEQ ID NO: 122423 - protein, 9 aa, Homo sapiens
DIRHMHFDG

SEQ ID NO: 122424 - protein, 9 aa, Homo sapiens
IRHMHFDGT

SEQ ID NO: 122425 - protein, 9 aa, Homo sapiens
RHMHFDGTD

SEQ ID NO: 122426 - protein, 9 aa, Homo sapiens
HMHFDGTDY

SEQ ID NO: 122427 - protein, 9 aa, Homo sapiens
MHFDGTDYG

SEQ ID NO: 122428 - protein, 9 aa, Homo sapiens
HFDGTDYGT

SEQ ID NO: 122429 - protein, 9 aa, Homo sapiens
FDGTDYGTL

SEQ ID NO: 122430 - protein, 9 aa, Homo sapiens
DGTDYGTLL

SEQ ID NO: 122431 - protein, 9 aa, Homo sapiens
GTDYGTLLS

SEQ ID NO: 122432 - protein, 9 aa, Homo sapiens
TDYGTLLSQ

SEQ ID NO: 122433 - protein, 9 aa, Homo sapiens
DYGTLLSQQ

SEQ ID NO: 122434 - protein, 9 aa, Homo sapiens
YGTLLSQQM

SEQ ID NO: 122435 - protein, 9 aa, Homo sapiens
GTLLSQQMG

SEQ ID NO: 122436 - protein, 9 aa, Homo sapiens
TLLSQQMGM

SEQ ID NO: 122437 - protein, 9 aa, Homo sapiens
LLSQQMGMV

SEQ ID NO: 122438 - protein, 9 aa, Homo sapiens
LSQQMGMVY

SEQ ID NO: 122439 - protein, 9 aa, Homo sapiens
SQQMGMVYA

SEQ ID NO: 122440 - protein, 9 aa, Homo sapiens
QQMGMVYAL

SEQ ID NO: 122441 - protein, 9 aa, Homo sapiens
QMGMVYALD

SEQ ID NO: 122442 - protein, 9 aa, Homo sapiens
MGMVYALDH

SEQ ID NO: 122443 - protein, 9 aa, Homo sapiens
GMVYALDHD

SEQ ID NO: 122444 - protein, 9 aa, Homo sapiens
MVYALDHDP

SEQ ID NO: 122445 - protein, 9 aa, Homo sapiens
VYALDHDPV

SEQ ID NO: 122446 - protein, 9 aa, Homo sapiens
YALDHDPVE

SEQ ID NO: 122447 - protein, 9 aa, Homo sapiens
ALDHDPVEN

SEQ ID NO: 122448 - protein, 9 aa, Homo sapiens
LDHDPVENK

SEQ ID NO: 122449 - protein, 9 aa, Homo sapiens
DHDPVENKI

SEQ ID NO: 122450 - protein, 9 aa, Homo sapiens
HDPVENKIY

SEQ ID NO: 122451 - protein, 9 aa, Homo sapiens
DPVENKIYF

SEQ ID NO: 122452 - protein, 9 aa, Homo sapiens
PVENKIYFA

SEQ ID NO: 122453 - protein, 9 aa, Homo sapiens
VENKIYFAH

SEQ ID NO: 122454 - protein, 9 aa, Homo sapiens
ENKIYFAHT

SEQ ID NO: 122455 - protein, 9 aa, Homo sapiens
NKIYFAHTA

SEQ ID NO: 122456 - protein, 9 aa, Homo sapiens
KIYFAHTAL

SEQ ID NO: 122457 - protein, 9 aa, Homo sapiens
IYFAHTALK

SEQ ID NO: 122458 - protein, 9 aa, Homo sapiens
YFAHTALKW

SEQ ID NO: 122459 - protein, 9 aa, Homo sapiens
FAHTALKWI

SEQ ID NO: 122460 - protein, 9 aa, Homo sapiens
AHTALKWIE

SEQ ID NO: 122461 - protein, 9 aa, Homo sapiens
HTALKWIER

SEQ ID NO: 122462 - protein, 9 aa, Homo sapiens
TALKWIERA

SEQ ID NO: 122463 - protein, 9 aa, Homo sapiens
ALKWIERAN

SEQ ID NO: 122464 - protein, 9 aa, Homo sapiens
LKWIERANM

SEQ ID NO: 122465 - protein, 9 aa, Homo sapiens
KWIERANMD

SEQ ID NO: 122466 - protein, 9 aa, Homo sapiens
WIERANMDG

SEQ ID NO: 122467 - protein, 9 aa, Homo sapiens
IERANMDGS

SEQ ID NO: 122468 - protein, 9 aa, Homo sapiens
ERANMDGSQ

SEQ ID NO: 122469 - protein, 9 aa, Homo sapiens
RANMDGSQR

SEQ ID NO: 122470 - protein, 9 aa, Homo sapiens
ANMDGSQRE

SEQ ID NO: 122471 - protein, 9 aa, Homo sapiens
NMDGSQRER

SEQ ID NO: 122472 - protein, 9 aa, Homo sapiens
MDGSQRERL

SEQ ID NO: 122473 - protein, 9 aa, Homo sapiens
DGSQRERLI

SEQ ID NO: 122474 - protein, 9 aa, Homo sapiens
GSQRERLIE

SEQ ID NO: 122475 - protein, 9 aa, Homo sapiens
SQRERLIEE

SEQ ID NO: 122476 - protein, 9 aa, Homo sapiens
QRERLIEEG

SEQ ID NO: 122477 - protein, 9 aa, Homo sapiens
RERLIEEGV

SEQ ID NO: 122478 - protein, 9 aa, Homo sapiens
ERLIEEGVD

SEQ ID NO: 122479 - protein, 9 aa, Homo sapiens
RLIEEGVDV

SEQ ID NO: 122480 - protein, 9 aa, Homo sapiens
LIEEGVDVP

SEQ ID NO: 122481 - protein, 9 aa, Homo sapiens
IEEGVDVPE

SEQ ID NO: 122482 - protein, 9 aa, Homo sapiens
EEGVDVPEG

SEQ ID NO: 122483 - protein, 9 aa, Homo sapiens
EGVDVPEGL

SEQ ID NO: 122484 - protein, 9 aa, Homo sapiens
GVDVPEGLA

SEQ ID NO: 122485 - protein, 9 aa, Homo sapiens
VDVPEGLAV

SEQ ID NO: 122486 - protein, 9 aa, Homo sapiens
DVPEGLAVD

SEQ ID NO: 122487 - protein, 9 aa, Homo sapiens
VPEGLAVDW

SEQ ID NO: 122488 - protein, 9 aa, Homo sapiens
PEGLAVDWI

SEQ ID NO: 122489 - protein, 9 aa, Homo sapiens
EGLAVDWIG

SEQ ID NO: 122490 - protein, 9 aa, Homo sapiens
GLAVDWIGR

SEQ ID NO: 122491 - protein, 9 aa, Homo sapiens
LAVDWIGRR

SEQ ID NO: 122492 - protein, 9 aa, Homo sapiens
AVDWIGRRF

SEQ ID NO: 122493 - protein, 9 aa, Homo sapiens
VDWIGRRFY

SEQ ID NO: 122494 - protein, 9 aa, Homo sapiens
DWIGRRFYW

SEQ ID NO: 122495 - protein, 9 aa, Homo sapiens
WIGRRFYWT

SEQ ID NO: 122496 - protein, 9 aa, Homo sapiens
IGRRFYWTD

SEQ ID NO: 122497 - protein, 9 aa, Homo sapiens
GRRFYWTDR

SEQ ID NO: 122498 - protein, 9 aa, Homo sapiens
RRFYWTDRG

SEQ ID NO: 122499 - protein, 9 aa, Homo sapiens
RFYWTDRGK

SEQ ID NO: 122500 - protein, 9 aa, Homo sapiens
FYWTDRGKS

SEQ ID NO: 122501 - protein, 9 aa, Homo sapiens
YWTDRGKSL

SEQ ID NO: 122502 - protein, 9 aa, Homo sapiens
WTDRGKSLI

SEQ ID NO: 122503 - protein, 9 aa, Homo sapiens
TDRGKSLIG

SEQ ID NO: 122504 - protein, 9 aa, Homo sapiens
DRGKSLIGR

SEQ ID NO: 122505 - protein, 9 aa, Homo sapiens
RGKSLIGRS

SEQ ID NO: 122506 - protein, 9 aa, Homo sapiens
GKSLIGRSD

SEQ ID NO: 122507 - protein, 9 aa, Homo sapiens
KSLIGRSDL

SEQ ID NO: 122508 - protein, 9 aa, Homo sapiens
SLIGRSDLN

SEQ ID NO: 122509 - protein, 9 aa, Homo sapiens
LIGRSDLNG

SEQ ID NO: 122510 - protein, 9 aa, Homo sapiens
IGRSDLNGK

SEQ ID NO: 122511 - protein, 9 aa, Homo sapiens
GRSDLNGKR

SEQ ID NO: 122512 - protein, 9 aa, Homo sapiens
RSDLNGKRS

SEQ ID NO: 122513 - protein, 9 aa, Homo sapiens
SDLNGKRSK

SEQ ID NO: 122514 - protein, 9 aa, Homo sapiens
DLNGKRSKI

SEQ ID NO: 122515 - protein, 9 aa, Homo sapiens
LNGKRSKII

SEQ ID NO: 122516 - protein, 9 aa, Homo sapiens
NGKRSKIIT

SEQ ID NO: 122517 - protein, 9 aa, Homo sapiens
GKRSKIITK

SEQ ID NO: 122518 - protein, 9 aa, Homo sapiens
KRSKIITKE

SEQ ID NO: 122519 - protein, 9 aa, Homo sapiens
RSKIITKEN

SEQ ID NO: 122520 - protein, 9 aa, Homo sapiens
SKIITKENI

SEQ ID NO: 122521 - protein, 9 aa, Homo sapiens
KIITKENIS

SEQ ID NO: 122522 - protein, 9 aa, Homo sapiens
IITKENISQ

SEQ ID NO: 122523 - protein, 9 aa, Homo sapiens
ITKENISQP

SEQ ID NO: 122524 - protein, 9 aa, Homo sapiens
TKENISQPR

SEQ ID NO: 122525 - protein, 9 aa, Homo sapiens
KENISQPRG

SEQ ID NO: 122526 - protein, 9 aa, Homo sapiens
ENISQPRGI

SEQ ID NO: 122527 - protein, 9 aa, Homo sapiens
NISQPRGIA

SEQ ID NO: 122528 - protein, 9 aa, Homo sapiens
ISQPRGIAV

SEQ ID NO: 122529 - protein, 9 aa, Homo sapiens
SQPRGIAVH

SEQ ID NO: 122530 - protein, 9 aa, Homo sapiens
QPRGIAVHP

SEQ ID NO: 122531 - protein, 9 aa, Homo sapiens
PRGIAVHPM

SEQ ID NO: 122532 - protein, 9 aa, Homo sapiens
RGIAVHPMA

SEQ ID NO: 122533 - protein, 9 aa, Homo sapiens
GIAVHPMAK

SEQ ID NO: 122534 - protein, 9 aa, Homo sapiens
IAVHPMAKR

SEQ ID NO: 122535 - protein, 9 aa, Homo sapiens
AVHPMAKRL

SEQ ID NO: 122536 - protein, 9 aa, Homo sapiens
VHPMAKRLF

SEQ ID NO: 122537 - protein, 9 aa, Homo sapiens
HPMAKRLFW

SEQ ID NO: 122538 - protein, 9 aa, Homo sapiens
PMAKRLFWT

SEQ ID NO: 122539 - protein, 9 aa, Homo sapiens
MAKRLFWTD

SEQ ID NO: 122540 - protein, 9 aa, Homo sapiens
AKRLFWTDT

SEQ ID NO: 122541 - protein, 9 aa, Homo sapiens
KRLFWTDTG

SEQ ID NO: 122542 - protein, 9 aa, Homo sapiens
RLFWTDTGI

SEQ ID NO: 122543 - protein, 9 aa, Homo sapiens
LFWTDTGIN

SEQ ID NO: 122544 - protein, 9 aa, Homo sapiens
FWTDTGINP

SEQ ID NO: 122545 - protein, 9 aa, Homo sapiens
WTDTGINPR

SEQ ID NO: 122546 - protein, 9 aa, Homo sapiens
TDTGINPRI

SEQ ID NO: 122547 - protein, 9 aa, Homo sapiens
DTGINPRIE

SEQ ID NO: 122548 - protein, 9 aa, Homo sapiens
TGINPRIES

SEQ ID NO: 122549 - protein, 9 aa, Homo sapiens
GINPRIESS

SEQ ID NO: 122550 - protein, 9 aa, Homo sapiens
INPRIESSS

SEQ ID NO: 122551 - protein, 9 aa, Homo sapiens
NPRIESSSL

SEQ ID NO: 122552 - protein, 9 aa, Homo sapiens
PRIESSSLQ

SEQ ID NO: 122553 - protein, 9 aa, Homo sapiens
RIESSSLQG

SEQ ID NO: 122554 - protein, 9 aa, Homo sapiens
IESSSLQGL

SEQ ID NO: 122555 - protein, 9 aa, Homo sapiens
ESSSLQGLG

SEQ ID NO: 122556 - protein, 9 aa, Homo sapiens
SSSLQGLGR

SEQ ID NO: 122557 - protein, 9 aa, Homo sapiens
SSLQGLGRL

SEQ ID NO: 122558 - protein, 9 aa, Homo sapiens
SLQGLGRLV

SEQ ID NO: 122559 - protein, 9 aa, Homo sapiens
LQGLGRLVI

SEQ ID NO: 122560 - protein, 9 aa, Homo sapiens
QGLGRLVIA

SEQ ID NO: 122561 - protein, 9 aa, Homo sapiens
GLGRLVIAS

SEQ ID NO: 122562 - protein, 9 aa, Homo sapiens
LGRLVIASS

SEQ ID NO: 122563 - protein, 9 aa, Homo sapiens
GRLVIASSD

SEQ ID NO: 122564 - protein, 9 aa, Homo sapiens
RLVIASSDL

SEQ ID NO: 122565 - protein, 9 aa, Homo sapiens
LVIASSDLI

SEQ ID NO: 122566 - protein, 9 aa, Homo sapiens
VIASSDLIW

SEQ ID NO: 122567 - protein, 9 aa, Homo sapiens
IASSDLIWP

SEQ ID NO: 122568 - protein, 9 aa, Homo sapiens
ASSDLIWPS

SEQ ID NO: 122569 - protein, 9 aa, Homo sapiens
SSDLIWPSG

SEQ ID NO: 122570 - protein, 9 aa, Homo sapiens
SDLIWPSGI

SEQ ID NO: 122571 - protein, 9 aa, Homo sapiens
DLIWPSGIT

SEQ ID NO: 122572 - protein, 9 aa, Homo sapiens
LIWPSGITI

SEQ ID NO: 122573 - protein, 9 aa, Homo sapiens
IWPSGITID

SEQ ID NO: 122574 - protein, 9 aa, Homo sapiens
WPSGITIDF

SEQ ID NO: 122575 - protein, 9 aa, Homo sapiens
PSGITIDFL

SEQ ID NO: 122576 - protein, 9 aa, Homo sapiens
SGITIDFLT

SEQ ID NO: 122577 - protein, 9 aa, Homo sapiens
GITIDFLTD

SEQ ID NO: 122578 - protein, 9 aa, Homo sapiens
ITIDFLTDK

SEQ ID NO: 122579 - protein, 9 aa, Homo sapiens
TIDFLTDKL

SEQ ID NO: 122580 - protein, 9 aa, Homo sapiens
IDFLTDKLY

SEQ ID NO: 122581 - protein, 9 aa, Homo sapiens
DFLTDKLYW

SEQ ID NO: 122582 - protein, 9 aa, Homo sapiens
FLTDKLYWC

SEQ ID NO: 122583 - protein, 9 aa, Homo sapiens
LTDKLYWCD

SEQ ID NO: 122584 - protein, 9 aa, Homo sapiens
TDKLYWCDA

SEQ ID NO: 122585 - protein, 9 aa, Homo sapiens
DKLYWCDAK

SEQ ID NO: 122586 - protein, 9 aa, Homo sapiens
KLYWCDAKQ

SEQ ID NO: 122587 - protein, 9 aa, Homo sapiens
LYWCDAKQS

SEQ ID NO: 122588 - protein, 9 aa, Homo sapiens
YWCDAKQSV

SEQ ID NO: 122589 - protein, 9 aa, Homo sapiens
WCDAKQSVI

SEQ ID NO: 122590 - protein, 9 aa, Homo sapiens
CDAKQSVIE

SEQ ID NO: 122591 - protein, 9 aa, Homo sapiens
DAKQSVIEM

SEQ ID NO: 122592 - protein, 9 aa, Homo sapiens
AKQSVIEMA

SEQ ID NO: 122593 - protein, 9 aa, Homo sapiens
KQSVIEMAN

SEQ ID NO: 122594 - protein, 9 aa, Homo sapiens
QSVIEMANL

SEQ ID NO: 122595 - protein, 9 aa, Homo sapiens
SVIEMANLD

SEQ ID NO: 122596 - protein, 9 aa, Homo sapiens
VIEMANLDG

SEQ ID NO: 122597 - protein, 9 aa, Homo sapiens
IEMANLDGS

SEQ ID NO: 122598 - protein, 9 aa, Homo sapiens
EMANLDGSK

SEQ ID NO: 122599 - protein, 9 aa, Homo sapiens
MANLDGSKR

SEQ ID NO: 122600 - protein, 9 aa, Homo sapiens
ANLDGSKRR

SEQ ID NO: 122601 - protein, 9 aa, Homo sapiens
NLDGSKRRR

SEQ ID NO: 122602 - protein, 9 aa, Homo sapiens
LDGSKRRRL

SEQ ID NO: 122603 - protein, 9 aa, Homo sapiens
DGSKRRRLT

SEQ ID NO: 122604 - protein, 9 aa, Homo sapiens
GSKRRRLTQ

SEQ ID NO: 122605 - protein, 9 aa, Homo sapiens
SKRRRLTQN

SEQ ID NO: 122606 - protein, 9 aa, Homo sapiens
KRRRLTQND

SEQ ID NO: 122607 - protein, 9 aa, Homo sapiens
RRRLTQNDV

SEQ ID NO: 122608 - protein, 9 aa, Homo sapiens
RRLTQNDVG

SEQ ID NO: 122609 - protein, 9 aa, Homo sapiens
RLTQNDVGH

SEQ ID NO: 122610 - protein, 9 aa, Homo sapiens
LTQNDVGHP

SEQ ID NO: 122611 - protein, 9 aa, Homo sapiens
TQNDVGHPF

SEQ ID NO: 122612 - protein, 9 aa, Homo sapiens
QNDVGHPFA

SEQ ID NO: 122613 - protein, 9 aa, Homo sapiens
NDVGHPFAV

SEQ ID NO: 122614 - protein, 9 aa, Homo sapiens
DVGHPFAVA

SEQ ID NO: 122615 - protein, 9 aa, Homo sapiens
VGHPFAVAV

SEQ ID NO: 122616 - protein, 9 aa, Homo sapiens
GHPFAVAVF

SEQ ID NO: 122617 - protein, 9 aa, Homo sapiens
HPFAVAVFE

SEQ ID NO: 122618 - protein, 9 aa, Homo sapiens
PFAVAVFED

SEQ ID NO: 122619 - protein, 9 aa, Homo sapiens
FAVAVFEDY

SEQ ID NO: 122620 - protein, 9 aa, Homo sapiens
AVAVFEDYV

SEQ ID NO: 122621 - protein, 9 aa, Homo sapiens
VAVFEDYVW

SEQ ID NO: 122622 - protein, 9 aa, Homo sapiens
AVFEDYVWF

SEQ ID NO: 122623 - protein, 9 aa, Homo sapiens
VFEDYVWFS

SEQ ID NO: 122624 - protein, 9 aa, Homo sapiens
FEDYVWFSD

SEQ ID NO: 122625 - protein, 9 aa, Homo sapiens
EDYVWFSDW

SEQ ID NO: 122626 - protein, 9 aa, Homo sapiens
DYVWFSDWA

SEQ ID NO: 122627 - protein, 9 aa, Homo sapiens
YVWFSDWAM

SEQ ID NO: 122628 - protein, 9 aa, Homo sapiens
VWFSDWAMP

SEQ ID NO: 122629 - protein, 9 aa, Homo sapiens
WFSDWAMPS

SEQ ID NO: 122630 - protein, 9 aa, Homo sapiens
FSDWAMPSV

SEQ ID NO: 122631 - protein, 9 aa, Homo sapiens
SDWAMPSVI

SEQ ID NO: 122632 - protein, 9 aa, Homo sapiens
DWAMPSVIR

SEQ ID NO: 122633 - protein, 9 aa, Homo sapiens
WAMPSVIRV

SEQ ID NO: 122634 - protein, 9 aa, Homo sapiens
AMPSVIRVN

SEQ ID NO: 122635 - protein, 9 aa, Homo sapiens
MPSVIRVNK

SEQ ID NO: 122636 - protein, 9 aa, Homo sapiens
PSVIRVNKR

SEQ ID NO: 122637 - protein, 9 aa, Homo sapiens
SVIRVNKRT

SEQ ID NO: 122638 - protein, 9 aa, Homo sapiens
VIRVNKRTG

SEQ ID NO: 122639 - protein, 9 aa, Homo sapiens
IRVNKRTGK

SEQ ID NO: 122640 - protein, 9 aa, Homo sapiens
RVNKRTGKD

SEQ ID NO: 122641 - protein, 9 aa, Homo sapiens
VNKRTGKDR

SEQ ID NO: 122642 - protein, 9 aa, Homo sapiens
NKRTGKDRV

SEQ ID NO: 122643 - protein, 9 aa, Homo sapiens
KRTGKDRVR

SEQ ID NO: 122644 - protein, 9 aa, Homo sapiens
RTGKDRVRL

SEQ ID NO: 122645 - protein, 9 aa, Homo sapiens
TGKDRVRLQ

SEQ ID NO: 122646 - protein, 9 aa, Homo sapiens
GKDRVRLQG

SEQ ID NO: 122647 - protein, 9 aa, Homo sapiens
KDRVRLQGS

SEQ ID NO: 122648 - protein, 9 aa, Homo sapiens
DRVRLQGSM

SEQ ID NO: 122649 - protein, 9 aa, Homo sapiens
RVRLQGSML

SEQ ID NO: 122650 - protein, 9 aa, Homo sapiens
VRLQGSMLK

SEQ ID NO: 122651 - protein, 9 aa, Homo sapiens
RLQGSMLKP

SEQ ID NO: 122652 - protein, 9 aa, Homo sapiens
LQGSMLKPS

SEQ ID NO: 122653 - protein, 9 aa, Homo sapiens
QGSMLKPSS

SEQ ID NO: 122654 - protein, 9 aa, Homo sapiens
GSMLKPSSL

SEQ ID NO: 122655 - protein, 9 aa, Homo sapiens
SMLKPSSLV

SEQ ID NO: 122656 - protein, 9 aa, Homo sapiens
MLKPSSLVV

SEQ ID NO: 122657 - protein, 9 aa, Homo sapiens
LKPSSLVVV

SEQ ID NO: 122658 - protein, 9 aa, Homo sapiens
KPSSLVVVH

SEQ ID NO: 122659 - protein, 9 aa, Homo sapiens
PSSLVVVHP

SEQ ID NO: 122660 - protein, 9 aa, Homo sapiens
SSLVVVHPL

SEQ ID NO: 122661 - protein, 9 aa, Homo sapiens
SLVVVHPLA

SEQ ID NO: 122662 - protein, 9 aa, Homo sapiens
LVVVHPLAK

SEQ ID NO: 122663 - protein, 9 aa, Homo sapiens
VVVHPLAKP

SEQ ID NO: 122664 - protein, 9 aa, Homo sapiens
VVHPLAKPG

SEQ ID NO: 122665 - protein, 9 aa, Homo sapiens
VHPLAKPGA

SEQ ID NO: 122666 - protein, 9 aa, Homo sapiens
HPLAKPGAD

SEQ ID NO: 122667 - protein, 9 aa, Homo sapiens
PLAKPGADP

SEQ ID NO: 122668 - protein, 9 aa, Homo sapiens
LAKPGADPC

SEQ ID NO: 122669 - protein, 9 aa, Homo sapiens
AKPGADPCL

SEQ ID NO: 122670 - protein, 9 aa, Homo sapiens
KPGADPCLY

SEQ ID NO: 122671 - protein, 9 aa, Homo sapiens
PGADPCLYQ

SEQ ID NO: 122672 - protein, 9 aa, Homo sapiens
GADPCLYQN

SEQ ID NO: 122673 - protein, 9 aa, Homo sapiens
ADPCLYQNG

SEQ ID NO: 122674 - protein, 9 aa, Homo sapiens
DPCLYQNGG

SEQ ID NO: 122675 - protein, 9 aa, Homo sapiens
PCLYQNGGC

SEQ ID NO: 122676 - protein, 9 aa, Homo sapiens
CLYQNGGCE

SEQ ID NO: 122677 - protein, 9 aa, Homo sapiens
LYQNGGCEH

SEQ ID NO: 122678 - protein, 9 aa, Homo sapiens
YQNGGCEHI

SEQ ID NO: 122679 - protein, 9 aa, Homo sapiens
QNGGCEHIC

SEQ ID NO: 122680 - protein, 9 aa, Homo sapiens
NGGCEHICK

SEQ ID NO: 122681 - protein, 9 aa, Homo sapiens
GGCEHICKK

SEQ ID NO: 122682 - protein, 9 aa, Homo sapiens
GCEHICKKR

SEQ ID NO: 122683 - protein, 9 aa, Homo sapiens
CEHICKKRL

SEQ ID NO: 122684 - protein, 9 aa, Homo sapiens
EHICKKRLG

SEQ ID NO: 122685 - protein, 9 aa, Homo sapiens
HICKKRLGT

SEQ ID NO: 122686 - protein, 9 aa, Homo sapiens
ICKKRLGTA

SEQ ID NO: 122687 - protein, 9 aa, Homo sapiens
CKKRLGTAW

SEQ ID NO: 122688 - protein, 9 aa, Homo sapiens
KKRLGTAWC

SEQ ID NO: 122689 - protein, 9 aa, Homo sapiens
KRLGTAWCS

SEQ ID NO: 122690 - protein, 9 aa, Homo sapiens
RLGTAWCSC

SEQ ID NO: 122691 - protein, 9 aa, Homo sapiens
LGTAWCSCR

SEQ ID NO: 122692 - protein, 9 aa, Homo sapiens
GTAWCSCRE

SEQ ID NO: 122693 - protein, 9 aa, Homo sapiens
TAWCSCREG

SEQ ID NO: 122694 - protein, 9 aa, Homo sapiens
AWCSCREGF

SEQ ID NO: 122695 - protein, 9 aa, Homo sapiens
WCSCREGFM

SEQ ID NO: 122696 - protein, 9 aa, Homo sapiens
CSCREGFMK

SEQ ID NO: 122697 - protein, 9 aa, Homo sapiens
SCREGFMKA

SEQ ID NO: 122698 - protein, 9 aa, Homo sapiens
CREGFMKAS

SEQ ID NO: 122699 - protein, 9 aa, Homo sapiens
REGFMKASD

SEQ ID NO: 122700 - protein, 9 aa, Homo sapiens
EGFMKASDG

SEQ ID NO: 122701 - protein, 9 aa, Homo sapiens
GFMKASDGK

SEQ ID NO: 122702 - protein, 9 aa, Homo sapiens
FMKASDGKT

SEQ ID NO: 122703 - protein, 9 aa, Homo sapiens
MKASDGKTC

SEQ ID NO: 122704 - protein, 9 aa, Homo sapiens
KASDGKTCL

SEQ ID NO: 122705 - protein, 9 aa, Homo sapiens
ASDGKTCLA

SEQ ID NO: 122706 - protein, 9 aa, Homo sapiens
SDGKTCLAL

SEQ ID NO: 122707 - protein, 9 aa, Homo sapiens
DGKTCLALD

SEQ ID NO: 122708 - protein, 9 aa, Homo sapiens
GKTCLALDG

SEQ ID NO: 122709 - protein, 9 aa, Homo sapiens
KTCLALDGH

SEQ ID NO: 122710 - protein, 9 aa, Homo sapiens
TCLALDGHQ

SEQ ID NO: 122711 - protein, 9 aa, Homo sapiens
CLALDGHQL

SEQ ID NO: 122712 - protein, 9 aa, Homo sapiens
LALDGHQLL

SEQ ID NO: 122713 - protein, 9 aa, Homo sapiens
ALDGHQLLA

SEQ ID NO: 122714 - protein, 9 aa, Homo sapiens
LDGHQLLAG

SEQ ID NO: 122715 - protein, 9 aa, Homo sapiens
DGHQLLAGG

SEQ ID NO: 122716 - protein, 9 aa, Homo sapiens
GHQLLAGGE

SEQ ID NO: 122717 - protein, 9 aa, Homo sapiens
HQLLAGGEV

SEQ ID NO: 122718 - protein, 9 aa, Homo sapiens
QLLAGGEVD

SEQ ID NO: 122719 - protein, 9 aa, Homo sapiens
LLAGGEVDL

SEQ ID NO: 122720 - protein, 9 aa, Homo sapiens
LAGGEVDLK

SEQ ID NO: 122721 - protein, 9 aa, Homo sapiens
AGGEVDLKN

SEQ ID NO: 122722 - protein, 9 aa, Homo sapiens
GGEVDLKNQ

SEQ ID NO: 122723 - protein, 9 aa, Homo sapiens
GEVDLKNQV

SEQ ID NO: 122724 - protein, 9 aa, Homo sapiens
EVDLKNQVT

SEQ ID NO: 122725 - protein, 9 aa, Homo sapiens
VDLKNQVTP

SEQ ID NO: 122726 - protein, 9 aa, Homo sapiens
DLKNQVTPL

SEQ ID NO: 122727 - protein, 9 aa, Homo sapiens
LKNQVTPLD

SEQ ID NO: 122728 - protein, 9 aa, Homo sapiens
KNQVTPLDI

SEQ ID NO: 122729 - protein, 9 aa, Homo sapiens
NQVTPLDIL

SEQ ID NO: 122730 - protein, 9 aa, Homo sapiens
QVTPLDILS

SEQ ID NO: 122731 - protein, 9 aa, Homo sapiens
VTPLDILSK

SEQ ID NO: 122732 - protein, 9 aa, Homo sapiens
TPLDILSKT

SEQ ID NO: 122733 - protein, 9 aa, Homo sapiens
PLDILSKTR

SEQ ID NO: 122734 - protein, 9 aa, Homo sapiens
LDILSKTRV

SEQ ID NO: 122735 - protein, 9 aa, Homo sapiens
DILSKTRVS

SEQ ID NO: 122736 - protein, 9 aa, Homo sapiens
ILSKTRVSE

SEQ ID NO: 122737 - protein, 9 aa, Homo sapiens
LSKTRVSED

SEQ ID NO: 122738 - protein, 9 aa, Homo sapiens
SKTRVSEDN

SEQ ID NO: 122739 - protein, 9 aa, Homo sapiens
KTRVSEDNI

SEQ ID NO: 122740 - protein, 9 aa, Homo sapiens
TRVSEDNIT

SEQ ID NO: 122741 - protein, 9 aa, Homo sapiens
RVSEDNITE

SEQ ID NO: 122742 - protein, 9 aa, Homo sapiens
VSEDNITES

SEQ ID NO: 122743 - protein, 9 aa, Homo sapiens
SEDNITESQ

SEQ ID NO: 122744 - protein, 9 aa, Homo sapiens
EDNITESQH

SEQ ID NO: 122745 - protein, 9 aa, Homo sapiens
DNITESQHM

SEQ ID NO: 122746 - protein, 9 aa, Homo sapiens
NITESQHML

SEQ ID NO: 122747 - protein, 9 aa, Homo sapiens
ITESQHMLV

SEQ ID NO: 122748 - protein, 9 aa, Homo sapiens
TESQHMLVA

SEQ ID NO: 122749 - protein, 9 aa, Homo sapiens
ESQHMLVAE

SEQ ID NO: 122750 - protein, 9 aa, Homo sapiens
SQHMLVAEI

SEQ ID NO: 122751 - protein, 9 aa, Homo sapiens
QHMLVAEIM

SEQ ID NO: 122752 - protein, 9 aa, Homo sapiens
HMLVAEIMV

SEQ ID NO: 122753 - protein, 9 aa, Homo sapiens
MLVAEIMVS

SEQ ID NO: 122754 - protein, 9 aa, Homo sapiens
LVAEIMVSD

SEQ ID NO: 122755 - protein, 9 aa, Homo sapiens
VAEIMVSDQ

SEQ ID NO: 122756 - protein, 9 aa, Homo sapiens
AEIMVSDQD

SEQ ID NO: 122757 - protein, 9 aa, Homo sapiens
EIMVSDQDD

SEQ ID NO: 122758 - protein, 9 aa, Homo sapiens
IMVSDQDDC

SEQ ID NO: 122759 - protein, 9 aa, Homo sapiens
MVSDQDDCA

SEQ ID NO: 122760 - protein, 9 aa, Homo sapiens
VSDQDDCAP

SEQ ID NO: 122761 - protein, 9 aa, Homo sapiens
SDQDDCAPV

SEQ ID NO: 122762 - protein, 9 aa, Homo sapiens
DQDDCAPVG

SEQ ID NO: 122763 - protein, 9 aa, Homo sapiens
QDDCAPVGC

SEQ ID NO: 122764 - protein, 9 aa, Homo sapiens
DDCAPVGCS

SEQ ID NO: 122765 - protein, 9 aa, Homo sapiens
DCAPVGCSM

SEQ ID NO: 122766 - protein, 9 aa, Homo sapiens
CAPVGCSMY

SEQ ID NO: 122767 - protein, 9 aa, Homo sapiens
APVGCSMYA

SEQ ID NO: 122768 - protein, 9 aa, Homo sapiens
PVGCSMYAR

SEQ ID NO: 122769 - protein, 9 aa, Homo sapiens
VGCSMYARC

SEQ ID NO: 122770 - protein, 9 aa, Homo sapiens
GCSMYARCI

SEQ ID NO: 122771 - protein, 9 aa, Homo sapiens
CSMYARCIS

SEQ ID NO: 122772 - protein, 9 aa, Homo sapiens
SMYARCISE

SEQ ID NO: 122773 - protein, 9 aa, Homo sapiens
MYARCISEG

SEQ ID NO: 122774 - protein, 9 aa, Homo sapiens
YARCISEGE

SEQ ID NO: 122775 - protein, 9 aa, Homo sapiens
ARCISEGED

SEQ ID NO: 122776 - protein, 9 aa, Homo sapiens
RCISEGEDA

SEQ ID NO: 122777 - protein, 9 aa, Homo sapiens
CISEGEDAT

SEQ ID NO: 122778 - protein, 9 aa, Homo sapiens
ISEGEDATC

SEQ ID NO: 122779 - protein, 9 aa, Homo sapiens
SEGEDATCQ

SEQ ID NO: 122780 - protein, 9 aa, Homo sapiens
EGEDATCQC

SEQ ID NO: 122781 - protein, 9 aa, Homo sapiens
GEDATCQCL

SEQ ID NO: 122782 - protein, 9 aa, Homo sapiens
EDATCQCLK

SEQ ID NO: 122783 - protein, 9 aa, Homo sapiens
DATCQCLKG

SEQ ID NO: 122784 - protein, 9 aa, Homo sapiens
ATCQCLKGF

SEQ ID NO: 122785 - protein, 9 aa, Homo sapiens
TCQCLKGFA

SEQ ID NO: 122786 - protein, 9 aa, Homo sapiens
CQCLKGFAG

SEQ ID NO: 122787 - protein, 9 aa, Homo sapiens
QCLKGFAGD

SEQ ID NO: 122788 - protein, 9 aa, Homo sapiens
CLKGFAGDG

SEQ ID NO: 122789 - protein, 9 aa, Homo sapiens
LKGFAGDGK

SEQ ID NO: 122790 - protein, 9 aa, Homo sapiens
KGFAGDGKL

SEQ ID NO: 122791 - protein, 9 aa, Homo sapiens
GFAGDGKLC

SEQ ID NO: 122792 - protein, 9 aa, Homo sapiens
FAGDGKLCS

SEQ ID NO: 122793 - protein, 9 aa, Homo sapiens
AGDGKLCSD

SEQ ID NO: 122794 - protein, 9 aa, Homo sapiens
GDGKLCSDI

SEQ ID NO: 122795 - protein, 9 aa, Homo sapiens
DGKLCSDID

SEQ ID NO: 122796 - protein, 9 aa, Homo sapiens
GKLCSDIDE

SEQ ID NO: 122797 - protein, 9 aa, Homo sapiens
KLCSDIDEC

SEQ ID NO: 122798 - protein, 9 aa, Homo sapiens
LCSDIDECE

SEQ ID NO: 122799 - protein, 9 aa, Homo sapiens
CSDIDECEM

SEQ ID NO: 122800 - protein, 9 aa, Homo sapiens
SDIDECEMG

SEQ ID NO: 122801 - protein, 9 aa, Homo sapiens
DIDECEMGV

SEQ ID NO: 122802 - protein, 9 aa, Homo sapiens
IDECEMGVP

SEQ ID NO: 122803 - protein, 9 aa, Homo sapiens
DECEMGVPV

SEQ ID NO: 122804 - protein, 9 aa, Homo sapiens
ECEMGVPVC

SEQ ID NO: 122805 - protein, 9 aa, Homo sapiens
CEMGVPVCP

SEQ ID NO: 122806 - protein, 9 aa, Homo sapiens
EMGVPVCPP

SEQ ID NO: 122807 - protein, 9 aa, Homo sapiens
MGVPVCPPA

SEQ ID NO: 122808 - protein, 9 aa, Homo sapiens
GVPVCPPAS

SEQ ID NO: 122809 - protein, 9 aa, Homo sapiens
VPVCPPASS

SEQ ID NO: 122810 - protein, 9 aa, Homo sapiens
PVCPPASSK

SEQ ID NO: 122811 - protein, 9 aa, Homo sapiens
VCPPASSKC

SEQ ID NO: 122812 - protein, 9 aa, Homo sapiens
CPPASSKCI

SEQ ID NO: 122813 - protein, 9 aa, Homo sapiens
PPASSKCIN

SEQ ID NO: 122814 - protein, 9 aa, Homo sapiens
PASSKCINT

SEQ ID NO: 122815 - protein, 9 aa, Homo sapiens
ASSKCINTE

SEQ ID NO: 122816 - protein, 9 aa, Homo sapiens
SSKCINTEG

SEQ ID NO: 122817 - protein, 9 aa, Homo sapiens
SKCINTEGG

SEQ ID NO: 122818 - protein, 9 aa, Homo sapiens
KCINTEGGY

SEQ ID NO: 122819 - protein, 9 aa, Homo sapiens
CINTEGGYV

SEQ ID NO: 122820 - protein, 9 aa, Homo sapiens
INTEGGYVC

SEQ ID NO: 122821 - protein, 9 aa, Homo sapiens
NTEGGYVCR

SEQ ID NO: 122822 - protein, 9 aa, Homo sapiens
TEGGYVCRC

SEQ ID NO: 122823 - protein, 9 aa, Homo sapiens
EGGYVCRCS

SEQ ID NO: 122824 - protein, 9 aa, Homo sapiens
GGYVCRCSE

SEQ ID NO: 122825 - protein, 9 aa, Homo sapiens
GYVCRCSEG

SEQ ID NO: 122826 - protein, 9 aa, Homo sapiens
YVCRCSEGY

SEQ ID NO: 122827 - protein, 9 aa, Homo sapiens
VCRCSEGYQ

SEQ ID NO: 122828 - protein, 9 aa, Homo sapiens
CRCSEGYQG

SEQ ID NO: 122829 - protein, 9 aa, Homo sapiens
RCSEGYQGD

SEQ ID NO: 122830 - protein, 9 aa, Homo sapiens
CSEGYQGDG

SEQ ID NO: 122831 - protein, 9 aa, Homo sapiens
SEGYQGDGI

SEQ ID NO: 122832 - protein, 9 aa, Homo sapiens
EGYQGDGIH

SEQ ID NO: 122833 - protein, 9 aa, Homo sapiens
GYQGDGIHC

SEQ ID NO: 122834 - protein, 9 aa, Homo sapiens
YQGDGIHCL

SEQ ID NO: 122835 - protein, 9 aa, Homo sapiens
QGDGIHCLD

SEQ ID NO: 122836 - protein, 9 aa, Homo sapiens
GDGIHCLDI

SEQ ID NO: 122837 - protein, 9 aa, Homo sapiens
DGIHCLDID

SEQ ID NO: 122838 - protein, 9 aa, Homo sapiens
GIHCLDIDE

SEQ ID NO: 122839 - protein, 9 aa, Homo sapiens
IHCLDIDEC

SEQ ID NO: 122840 - protein, 9 aa, Homo sapiens
HCLDIDECQ

SEQ ID NO: 122841 - protein, 9 aa, Homo sapiens
CLDIDECQL

SEQ ID NO: 122842 - protein, 9 aa, Homo sapiens
LDIDECQLG

SEQ ID NO: 122843 - protein, 9 aa, Homo sapiens
DIDECQLGV

SEQ ID NO: 122844 - protein, 9 aa, Homo sapiens
IDECQLGVH

SEQ ID NO: 122845 - protein, 9 aa, Homo sapiens
DECQLGVHS

SEQ ID NO: 122846 - protein, 9 aa, Homo sapiens
ECQLGVHSC

SEQ ID NO: 122847 - protein, 9 aa, Homo sapiens
CQLGVHSCG

SEQ ID NO: 122848 - protein, 9 aa, Homo sapiens
QLGVHSCGE

SEQ ID NO: 122849 - protein, 9 aa, Homo sapiens
LGVHSCGEN

SEQ ID NO: 122850 - protein, 9 aa, Homo sapiens
GVHSCGENA

SEQ ID NO: 122851 - protein, 9 aa, Homo sapiens
VHSCGENAS

SEQ ID NO: 122852 - protein, 9 aa, Homo sapiens
HSCGENASC

SEQ ID NO: 122853 - protein, 9 aa, Homo sapiens
SCGENASCT

SEQ ID NO: 122854 - protein, 9 aa, Homo sapiens
CGENASCTN

SEQ ID NO: 122855 - protein, 9 aa, Homo sapiens
GENASCTNT

SEQ ID NO: 122856 - protein, 9 aa, Homo sapiens
ENASCTNTE

SEQ ID NO: 122857 - protein, 9 aa, Homo sapiens
NASCTNTEG

SEQ ID NO: 122858 - protein, 9 aa, Homo sapiens
ASCTNTEGG

SEQ ID NO: 122859 - protein, 9 aa, Homo sapiens
SCTNTEGGY

SEQ ID NO: 122860 - protein, 9 aa, Homo sapiens
CTNTEGGYT

SEQ ID NO: 122861 - protein, 9 aa, Homo sapiens
TNTEGGYTC

SEQ ID NO: 122862 - protein, 9 aa, Homo sapiens
NTEGGYTCM

SEQ ID NO: 122863 - protein, 9 aa, Homo sapiens
TEGGYTCMC

SEQ ID NO: 122864 - protein, 9 aa, Homo sapiens
EGGYTCMCA

SEQ ID NO: 122865 - protein, 9 aa, Homo sapiens
GGYTCMCAG

SEQ ID NO: 122866 - protein, 9 aa, Homo sapiens
GYTCMCAGR

SEQ ID NO: 122867 - protein, 9 aa, Homo sapiens
YTCMCAGRL

SEQ ID NO: 122868 - protein, 9 aa, Homo sapiens
TCMCAGRLS

SEQ ID NO: 122869 - protein, 9 aa, Homo sapiens
CMCAGRLSE

SEQ ID NO: 122870 - protein, 9 aa, Homo sapiens
MCAGRLSEP

SEQ ID NO: 122871 - protein, 9 aa, Homo sapiens
CAGRLSEPG

SEQ ID NO: 122872 - protein, 9 aa, Homo sapiens
AGRLSEPGL

SEQ ID NO: 122873 - protein, 9 aa, Homo sapiens
GRLSEPGLI

SEQ ID NO: 122874 - protein, 9 aa, Homo sapiens
RLSEPGLIC

SEQ ID NO: 122875 - protein, 9 aa, Homo sapiens
LSEPGLICP

SEQ ID NO: 122876 - protein, 9 aa, Homo sapiens
SEPGLICPD

SEQ ID NO: 122877 - protein, 9 aa, Homo sapiens
EPGLICPDS

SEQ ID NO: 122878 - protein, 9 aa, Homo sapiens
PGLICPDST

SEQ ID NO: 122879 - protein, 9 aa, Homo sapiens
GLICPDSTP

SEQ ID NO: 122880 - protein, 9 aa, Homo sapiens
LICPDSTPP

SEQ ID NO: 122881 - protein, 9 aa, Homo sapiens
ICPDSTPPP

SEQ ID NO: 122882 - protein, 9 aa, Homo sapiens
CPDSTPPPH

SEQ ID NO: 122883 - protein, 9 aa, Homo sapiens
PDSTPPPHL

SEQ ID NO: 122884 - protein, 9 aa, Homo sapiens
DSTPPPHLR

SEQ ID NO: 122885 - protein, 9 aa, Homo sapiens
STPPPHLRE

SEQ ID NO: 122886 - protein, 9 aa, Homo sapiens
TPPPHLRED

SEQ ID NO: 122887 - protein, 9 aa, Homo sapiens
PPPHLREDD

SEQ ID NO: 122888 - protein, 9 aa, Homo sapiens
PPHLREDDH

SEQ ID NO: 122889 - protein, 9 aa, Homo sapiens
PHLREDDHH

SEQ ID NO: 122890 - protein, 9 aa, Homo sapiens
HLREDDHHY

SEQ ID NO: 122891 - protein, 9 aa, Homo sapiens
LREDDHHYS

SEQ ID NO: 122892 - protein, 9 aa, Homo sapiens
REDDHHYSV

SEQ ID NO: 122893 - protein, 9 aa, Homo sapiens
EDDHHYSVR

SEQ ID NO: 122894 - protein, 9 aa, Homo sapiens
DDHHYSVRN

SEQ ID NO: 122895 - protein, 9 aa, Homo sapiens
DHHYSVRNS

SEQ ID NO: 122896 - protein, 9 aa, Homo sapiens
HHYSVRNSD

SEQ ID NO: 122897 - protein, 9 aa, Homo sapiens
HYSVRNSDS

SEQ ID NO: 122898 - protein, 9 aa, Homo sapiens
YSVRNSDSE

SEQ ID NO: 122899 - protein, 9 aa, Homo sapiens
SVRNSDSEC

SEQ ID NO: 122900 - protein, 9 aa, Homo sapiens
VRNSDSECP

SEQ ID NO: 122901 - protein, 9 aa, Homo sapiens
RNSDSECPL

SEQ ID NO: 122902 - protein, 9 aa, Homo sapiens
NSDSECPLS

SEQ ID NO: 122903 - protein, 9 aa, Homo sapiens
SDSECPLSH

SEQ ID NO: 122904 - protein, 9 aa, Homo sapiens
DSECPLSHD

SEQ ID NO: 122905 - protein, 9 aa, Homo sapiens
SECPLSHDG

SEQ ID NO: 122906 - protein, 9 aa, Homo sapiens
ECPLSHDGY

SEQ ID NO: 122907 - protein, 9 aa, Homo sapiens
CPLSHDGYC

SEQ ID NO: 122908 - protein, 9 aa, Homo sapiens
PLSHDGYCL

SEQ ID NO: 122909 - protein, 9 aa, Homo sapiens
LSHDGYCLH

SEQ ID NO: 122910 - protein, 9 aa, Homo sapiens
SHDGYCLHD

SEQ ID NO: 122911 - protein, 9 aa, Homo sapiens
HDGYCLHDG

SEQ ID NO: 122912 - protein, 9 aa, Homo sapiens
DGYCLHDGV

SEQ ID NO: 122913 - protein, 9 aa, Homo sapiens
GYCLHDGVC

SEQ ID NO: 122914 - protein, 9 aa, Homo sapiens
YCLHDGVCM

SEQ ID NO: 122915 - protein, 9 aa, Homo sapiens
CLHDGVCMY

SEQ ID NO: 122916 - protein, 9 aa, Homo sapiens
LHDGVCMYI

SEQ ID NO: 122917 - protein, 9 aa, Homo sapiens
HDGVCMYIE

SEQ ID NO: 122918 - protein, 9 aa, Homo sapiens
DGVCMYIEA

SEQ ID NO: 122919 - protein, 9 aa, Homo sapiens
GVCMYIEAL

SEQ ID NO: 122920 - protein, 9 aa, Homo sapiens
VCMYIEALD

SEQ ID NO: 122921 - protein, 9 aa, Homo sapiens
CMYIEALDK

SEQ ID NO: 122922 - protein, 9 aa, Homo sapiens
MYIEALDKY

SEQ ID NO: 122923 - protein, 9 aa, Homo sapiens
YIEALDKYA

SEQ ID NO: 122924 - protein, 9 aa, Homo sapiens
IEALDKYAC

SEQ ID NO: 122925 - protein, 9 aa, Homo sapiens
EALDKYACN

SEQ ID NO: 122926 - protein, 9 aa, Homo sapiens
ALDKYACNC

SEQ ID NO: 122927 - protein, 9 aa, Homo sapiens
LDKYACNCV

SEQ ID NO: 122928 - protein, 9 aa, Homo sapiens
DKYACNCVV

SEQ ID NO: 122929 - protein, 9 aa, Homo sapiens
KYACNCVVG

SEQ ID NO: 122930 - protein, 9 aa, Homo sapiens
YACNCVVGY

SEQ ID NO: 122931 - protein, 9 aa, Homo sapiens
ACNCVVGYI

SEQ ID NO: 122932 - protein, 9 aa, Homo sapiens
CNCVVGYIG

SEQ ID NO: 122933 - protein, 9 aa, Homo sapiens
NCVVGYIGE

SEQ ID NO: 122934 - protein, 9 aa, Homo sapiens
CVVGYIGER

SEQ ID NO: 122935 - protein, 9 aa, Homo sapiens
VVGYIGERC

SEQ ID NO: 122936 - protein, 9 aa, Homo sapiens
VGYIGERCQ

SEQ ID NO: 122937 - protein, 9 aa, Homo sapiens
GYIGERCQY

SEQ ID NO: 122938 - protein, 9 aa, Homo sapiens
YIGERCQYR

SEQ ID NO: 122939 - protein, 9 aa, Homo sapiens
IGERCQYRD

SEQ ID NO: 122940 - protein, 9 aa, Homo sapiens
GERCQYRDL

SEQ ID NO: 122941 - protein, 9 aa, Homo sapiens
ERCQYRDLK

SEQ ID NO: 122942 - protein, 9 aa, Homo sapiens
RCQYRDLKW

SEQ ID NO: 122943 - protein, 9 aa, Homo sapiens
CQYRDLKWW

SEQ ID NO: 122944 - protein, 9 aa, Homo sapiens
QYRDLKWWE

SEQ ID NO: 122945 - protein, 9 aa, Homo sapiens
YRDLKWWEL

SEQ ID NO: 122946 - protein, 9 aa, Homo sapiens
RDLKWWELR

SEQ ID NO: 122947 - protein, 9 aa, Homo sapiens
DLKWWELRH

SEQ ID NO: 122948 - protein, 9 aa, Homo sapiens
LKWWELRHA

SEQ ID NO: 122949 - protein, 9 aa, Homo sapiens
KWWELRHAG

SEQ ID NO: 122950 - protein, 9 aa, Homo sapiens
WWELRHAGH

SEQ ID NO: 122951 - protein, 9 aa, Homo sapiens
WELRHAGHG

SEQ ID NO: 122952 - protein, 9 aa, Homo sapiens
ELRHAGHGQ

SEQ ID NO: 122953 - protein, 9 aa, Homo sapiens
LRHAGHGQQ

SEQ ID NO: 122954 - protein, 9 aa, Homo sapiens
RHAGHGQQQ

SEQ ID NO: 122955 - protein, 9 aa, Homo sapiens
HAGHGQQQK

SEQ ID NO: 122956 - protein, 9 aa, Homo sapiens
AGHGQQQKV

SEQ ID NO: 122957 - protein, 9 aa, Homo sapiens
GHGQQQKVI

SEQ ID NO: 122958 - protein, 9 aa, Homo sapiens
HGQQQKVIV

SEQ ID NO: 122959 - protein, 9 aa, Homo sapiens
GQQQKVIVV

SEQ ID NO: 122960 - protein, 9 aa, Homo sapiens
QQQKVIVVA

SEQ ID NO: 122961 - protein, 9 aa, Homo sapiens
QQKVIVVAV

SEQ ID NO: 122962 - protein, 9 aa, Homo sapiens
QKVIVVAVC

SEQ ID NO: 122963 - protein, 9 aa, Homo sapiens
KVIVVAVCV

SEQ ID NO: 122964 - protein, 9 aa, Homo sapiens
VIVVAVCVV

SEQ ID NO: 122965 - protein, 9 aa, Homo sapiens
IVVAVCVVV

SEQ ID NO: 122966 - protein, 9 aa, Homo sapiens
VVAVCVVVL

SEQ ID NO: 122967 - protein, 9 aa, Homo sapiens
VAVCVVVLV

SEQ ID NO: 122968 - protein, 9 aa, Homo sapiens
AVCVVVLVM

SEQ ID NO: 122969 - protein, 9 aa, Homo sapiens
VCVVVLVML

SEQ ID NO: 122970 - protein, 9 aa, Homo sapiens
CVVVLVMLL

SEQ ID NO: 122971 - protein, 9 aa, Homo sapiens
VVVLVMLLL

SEQ ID NO: 122972 - protein, 9 aa, Homo sapiens
VVLVMLLLL

SEQ ID NO: 122973 - protein, 9 aa, Homo sapiens
VLVMLLLLS

SEQ ID NO: 122974 - protein, 9 aa, Homo sapiens
LVMLLLLSL

SEQ ID NO: 122975 - protein, 9 aa, Homo sapiens
VMLLLLSLW

SEQ ID NO: 122976 - protein, 9 aa, Homo sapiens
MLLLLSLWG

SEQ ID NO: 122977 - protein, 9 aa, Homo sapiens
LLLLSLWGA

SEQ ID NO: 122978 - protein, 9 aa, Homo sapiens
LLLSLWGAH

SEQ ID NO: 122979 - protein, 9 aa, Homo sapiens
LLSLWGAHY

SEQ ID NO: 122980 - protein, 9 aa, Homo sapiens
LSLWGAHYY

SEQ ID NO: 122981 - protein, 9 aa, Homo sapiens
SLWGAHYYR

SEQ ID NO: 122982 - protein, 9 aa, Homo sapiens
LWGAHYYRT

SEQ ID NO: 122983 - protein, 9 aa, Homo sapiens
WGAHYYRTQ

SEQ ID NO: 122984 - protein, 9 aa, Homo sapiens
GAHYYRTQK

SEQ ID NO: 122985 - protein, 9 aa, Homo sapiens
AHYYRTQKL

SEQ ID NO: 122986 - protein, 9 aa, Homo sapiens
HYYRTQKLL

SEQ ID NO: 122987 - protein, 9 aa, Homo sapiens
YYRTQKLLS

SEQ ID NO: 122988 - protein, 9 aa, Homo sapiens
YRTQKLLSK

SEQ ID NO: 122989 - protein, 9 aa, Homo sapiens
RTQKLLSKN

SEQ ID NO: 122990 - protein, 9 aa, Homo sapiens
TQKLLSKNP

SEQ ID NO: 122991 - protein, 9 aa, Homo sapiens
QKLLSKNPK

SEQ ID NO: 122992 - protein, 9 aa, Homo sapiens
KLLSKNPKN

SEQ ID NO: 122993 - protein, 9 aa, Homo sapiens
LLSKNPKNP

SEQ ID NO: 122994 - protein, 9 aa, Homo sapiens
LSKNPKNPY

SEQ ID NO: 122995 - protein, 9 aa, Homo sapiens
SKNPKNPYE

SEQ ID NO: 122996 - protein, 9 aa, Homo sapiens
KNPKNPYEE

SEQ ID NO: 122997 - protein, 9 aa, Homo sapiens
NPKNPYEES

SEQ ID NO: 122998 - protein, 9 aa, Homo sapiens
PKNPYEESS

SEQ ID NO: 122999 - protein, 9 aa, Homo sapiens
KNPYEESSR

SEQ ID NO: 123000 - protein, 9 aa, Homo sapiens
NPYEESSRD

SEQ ID NO: 123001 - protein, 9 aa, Homo sapiens
PYEESSRDV

SEQ ID NO: 123002 - protein, 9 aa, Homo sapiens
YEESSRDVR

SEQ ID NO: 123003 - protein, 9 aa, Homo sapiens
EESSRDVRS

SEQ ID NO: 123004 - protein, 9 aa, Homo sapiens
ESSRDVRSR

SEQ ID NO: 123005 - protein, 9 aa, Homo sapiens
SSRDVRSRR

SEQ ID NO: 123006 - protein, 9 aa, Homo sapiens
SRDVRSRRP

SEQ ID NO: 123007 - protein, 9 aa, Homo sapiens
RDVRSRRPA

SEQ ID NO: 123008 - protein, 9 aa, Homo sapiens
DVRSRRPAD

SEQ ID NO: 123009 - protein, 9 aa, Homo sapiens
VRSRRPADT

SEQ ID NO: 123010 - protein, 9 aa, Homo sapiens
RSRRPADTE

SEQ ID NO: 123011 - protein, 9 aa, Homo sapiens
SRRPADTED

SEQ ID NO: 123012 - protein, 9 aa, Homo sapiens
RRPADTEDG

SEQ ID NO: 123013 - protein, 9 aa, Homo sapiens
RPADTEDGM

SEQ ID NO: 123014 - protein, 9 aa, Homo sapiens
PADTEDGMS

SEQ ID NO: 123015 - protein, 9 aa, Homo sapiens
ADTEDGMSS

SEQ ID NO: 123016 - protein, 9 aa, Homo sapiens
DTEDGMSSC

SEQ ID NO: 123017 - protein, 9 aa, Homo sapiens
TEDGMSSCP

SEQ ID NO: 123018 - protein, 9 aa, Homo sapiens
EDGMSSCPQ

SEQ ID NO: 123019 - protein, 9 aa, Homo sapiens
DGMSSCPQP

SEQ ID NO: 123020 - protein, 9 aa, Homo sapiens
GMSSCPQPW

SEQ ID NO: 123021 - protein, 9 aa, Homo sapiens
MSSCPQPWF

SEQ ID NO: 123022 - protein, 9 aa, Homo sapiens
SSCPQPWFV

SEQ ID NO: 123023 - protein, 9 aa, Homo sapiens
SCPQPWFVV

SEQ ID NO: 123024 - protein, 9 aa, Homo sapiens
CPQPWFVVI

SEQ ID NO: 123025 - protein, 9 aa, Homo sapiens
PQPWFVVIK

SEQ ID NO: 123026 - protein, 9 aa, Homo sapiens
QPWFVVIKE

SEQ ID NO: 123027 - protein, 9 aa, Homo sapiens
PWFVVIKEH

SEQ ID NO: 123028 - protein, 9 aa, Homo sapiens
WFVVIKEHQ

SEQ ID NO: 123029 - protein, 9 aa, Homo sapiens
FVVIKEHQD

SEQ ID NO: 123030 - protein, 9 aa, Homo sapiens
VVIKEHQDL

SEQ ID NO: 123031 - protein, 9 aa, Homo sapiens
VIKEHQDLK

SEQ ID NO: 123032 - protein, 9 aa, Homo sapiens
IKEHQDLKN

SEQ ID NO: 123033 - protein, 9 aa, Homo sapiens
KEHQDLKNG

SEQ ID NO: 123034 - protein, 9 aa, Homo sapiens
EHQDLKNGG

SEQ ID NO: 123035 - protein, 9 aa, Homo sapiens
HQDLKNGGQ

SEQ ID NO: 123036 - protein, 9 aa, Homo sapiens
QDLKNGGQP

SEQ ID NO: 123037 - protein, 9 aa, Homo sapiens
DLKNGGQPV

SEQ ID NO: 123038 - protein, 9 aa, Homo sapiens
LKNGGQPVA

SEQ ID NO: 123039 - protein, 9 aa, Homo sapiens
KNGGQPVAG

SEQ ID NO: 123040 - protein, 9 aa, Homo sapiens
NGGQPVAGE

SEQ ID NO: 123041 - protein, 9 aa, Homo sapiens
GGQPVAGED

SEQ ID NO: 123042 - protein, 9 aa, Homo sapiens
GQPVAGEDG

SEQ ID NO: 123043 - protein, 9 aa, Homo sapiens
QPVAGEDGQ

SEQ ID NO: 123044 - protein, 9 aa, Homo sapiens
PVAGEDGQA

SEQ ID NO: 123045 - protein, 9 aa, Homo sapiens
VAGEDGQAA

SEQ ID NO: 123046 - protein, 9 aa, Homo sapiens
AGEDGQAAD

SEQ ID NO: 123047 - protein, 9 aa, Homo sapiens
GEDGQAADG

SEQ ID NO: 123048 - protein, 9 aa, Homo sapiens
EDGQAADGS

SEQ ID NO: 123049 - protein, 9 aa, Homo sapiens
DGQAADGSM

SEQ ID NO: 123050 - protein, 9 aa, Homo sapiens
GQAADGSMQ

SEQ ID NO: 123051 - protein, 9 aa, Homo sapiens
QAADGSMQP

SEQ ID NO: 123052 - protein, 9 aa, Homo sapiens
AADGSMQPT

SEQ ID NO: 123053 - protein, 9 aa, Homo sapiens
ADGSMQPTS

SEQ ID NO: 123054 - protein, 9 aa, Homo sapiens
DGSMQPTSW

SEQ ID NO: 123055 - protein, 9 aa, Homo sapiens
GSMQPTSWR

SEQ ID NO: 123056 - protein, 9 aa, Homo sapiens
SMQPTSWRQ

SEQ ID NO: 123057 - protein, 9 aa, Homo sapiens
MQPTSWRQE

SEQ ID NO: 123058 - protein, 9 aa, Homo sapiens
QPTSWRQEP

SEQ ID NO: 123059 - protein, 9 aa, Homo sapiens
PTSWRQEPQ

SEQ ID NO: 123060 - protein, 9 aa, Homo sapiens
TSWRQEPQL

SEQ ID NO: 123061 - protein, 9 aa, Homo sapiens
SWRQEPQLC

SEQ ID NO: 123062 - protein, 9 aa, Homo sapiens
WRQEPQLCG

SEQ ID NO: 123063 - protein, 9 aa, Homo sapiens
RQEPQLCGM

SEQ ID NO: 123064 - protein, 9 aa, Homo sapiens
QEPQLCGMG

SEQ ID NO: 123065 - protein, 9 aa, Homo sapiens
EPQLCGMGT

SEQ ID NO: 123066 - protein, 9 aa, Homo sapiens
PQLCGMGTE

SEQ ID NO: 123067 - protein, 9 aa, Homo sapiens
QLCGMGTEQ

SEQ ID NO: 123068 - protein, 9 aa, Homo sapiens
LCGMGTEQG

SEQ ID NO: 123069 - protein, 9 aa, Homo sapiens
CGMGTEQGC

SEQ ID NO: 123070 - protein, 9 aa, Homo sapiens
GMGTEQGCW

SEQ ID NO: 123071 - protein, 9 aa, Homo sapiens
MGTEQGCWI

SEQ ID NO: 123072 - protein, 9 aa, Homo sapiens
GTEQGCWIP

SEQ ID NO: 123073 - protein, 9 aa, Homo sapiens
TEQGCWIPV

SEQ ID NO: 123074 - protein, 9 aa, Homo sapiens
EQGCWIPVS

SEQ ID NO: 123075 - protein, 9 aa, Homo sapiens
QGCWIPVSS

SEQ ID NO: 123076 - protein, 9 aa, Homo sapiens
GCWIPVSSD

SEQ ID NO: 123077 - protein, 9 aa, Homo sapiens
CWIPVSSDK

SEQ ID NO: 123078 - protein, 9 aa, Homo sapiens
WIPVSSDKG

SEQ ID NO: 123079 - protein, 9 aa, Homo sapiens
IPVSSDKGS

SEQ ID NO: 123080 - protein, 9 aa, Homo sapiens
PVSSDKGSC

SEQ ID NO: 123081 - protein, 9 aa, Homo sapiens
VSSDKGSCP

SEQ ID NO: 123082 - protein, 9 aa, Homo sapiens
SSDKGSCPQ

SEQ ID NO: 123083 - protein, 9 aa, Homo sapiens
SDKGSCPQV

SEQ ID NO: 123084 - protein, 9 aa, Homo sapiens
DKGSCPQVM

SEQ ID NO: 123085 - protein, 9 aa, Homo sapiens
KGSCPQVME

SEQ ID NO: 123086 - protein, 9 aa, Homo sapiens
GSCPQVMER

SEQ ID NO: 123087 - protein, 9 aa, Homo sapiens
SCPQVMERS

SEQ ID NO: 123088 - protein, 9 aa, Homo sapiens
CPQVMERSF

SEQ ID NO: 123089 - protein, 9 aa, Homo sapiens
PQVMERSFH

SEQ ID NO: 123090 - protein, 9 aa, Homo sapiens
QVMERSFHM

SEQ ID NO: 123091 - protein, 9 aa, Homo sapiens
VMERSFHMP

SEQ ID NO: 123092 - protein, 9 aa, Homo sapiens
MERSFHMPS

SEQ ID NO: 123093 - protein, 9 aa, Homo sapiens
ERSFHMPSY

SEQ ID NO: 123094 - protein, 9 aa, Homo sapiens
RSFHMPSYG

SEQ ID NO: 123095 - protein, 9 aa, Homo sapiens
SFHMPSYGT

SEQ ID NO: 123096 - protein, 9 aa, Homo sapiens
FHMPSYGTQ

SEQ ID NO: 123097 - protein, 9 aa, Homo sapiens
HMPSYGTQT

SEQ ID NO: 123098 - protein, 9 aa, Homo sapiens
MPSYGTQTL

SEQ ID NO: 123099 - protein, 9 aa, Homo sapiens
PSYGTQTLE

SEQ ID NO: 123100 - protein, 9 aa, Homo sapiens
SYGTQTLEG

SEQ ID NO: 123101 - protein, 9 aa, Homo sapiens
YGTQTLEGG

SEQ ID NO: 123102 - protein, 9 aa, Homo sapiens
GTQTLEGGV

SEQ ID NO: 123103 - protein, 9 aa, Homo sapiens
TQTLEGGVE

SEQ ID NO: 123104 - protein, 9 aa, Homo sapiens
QTLEGGVEK

SEQ ID NO: 123105 - protein, 9 aa, Homo sapiens
TLEGGVEKP

SEQ ID NO: 123106 - protein, 9 aa, Homo sapiens
LEGGVEKPH

SEQ ID NO: 123107 - protein, 9 aa, Homo sapiens
EGGVEKPHS

SEQ ID NO: 123108 - protein, 9 aa, Homo sapiens
GGVEKPHSL

SEQ ID NO: 123109 - protein, 9 aa, Homo sapiens
GVEKPHSLL

SEQ ID NO: 123110 - protein, 9 aa, Homo sapiens
VEKPHSLLS

SEQ ID NO: 123111 - protein, 9 aa, Homo sapiens
EKPHSLLSA

SEQ ID NO: 123112 - protein, 9 aa, Homo sapiens
KPHSLLSAN

SEQ ID NO: 123113 - protein, 9 aa, Homo sapiens
PHSLLSANP

SEQ ID NO: 123114 - protein, 9 aa, Homo sapiens
HSLLSANPL

SEQ ID NO: 123115 - protein, 9 aa, Homo sapiens
SLLSANPLW

SEQ ID NO: 123116 - protein, 9 aa, Homo sapiens
LLSANPLWQ

SEQ ID NO: 123117 - protein, 9 aa, Homo sapiens
LSANPLWQQ

SEQ ID NO: 123118 - protein, 9 aa, Homo sapiens
SANPLWQQR

SEQ ID NO: 123119 - protein, 9 aa, Homo sapiens
ANPLWQQRA

SEQ ID NO: 123120 - protein, 9 aa, Homo sapiens
NPLWQQRAL

SEQ ID NO: 123121 - protein, 9 aa, Homo sapiens
PLWQQRALD

SEQ ID NO: 123122 - protein, 9 aa, Homo sapiens
LWQQRALDP

SEQ ID NO: 123123 - protein, 9 aa, Homo sapiens
WQQRALDPP

SEQ ID NO: 123124 - protein, 9 aa, Homo sapiens
QQRALDPPH

SEQ ID NO: 123125 - protein, 9 aa, Homo sapiens
QRALDPPHQ

SEQ ID NO: 123126 - protein, 9 aa, Homo sapiens
RALDPPHQM

SEQ ID NO: 123127 - protein, 9 aa, Homo sapiens
ALDPPHQME

SEQ ID NO: 123128 - protein, 9 aa, Homo sapiens
LDPPHQMEL

SEQ ID NO: 123129 - protein, 9 aa, Homo sapiens
DPPHQMELT

SEQ ID NO: 123130 - protein, 9 aa, Homo sapiens
PPHQMELTQ

SEQ ID NO: 123131 - protein, 9 aa, Homo sapiens
MELAALCRW

SEQ ID NO: 123132 - protein, 9 aa, Homo sapiens
ELAALCRWG

SEQ ID NO: 123133 - protein, 9 aa, Homo sapiens
LAALCRWGL

SEQ ID NO: 123134 - protein, 9 aa, Homo sapiens
AALCRWGLL

SEQ ID NO: 123135 - protein, 9 aa, Homo sapiens
ALCRWGLLL

SEQ ID NO: 123136 - protein, 9 aa, Homo sapiens
LCRWGLLLA

SEQ ID NO: 123137 - protein, 9 aa, Homo sapiens
CRWGLLLAL

SEQ ID NO: 123138 - protein, 9 aa, Homo sapiens
RWGLLLALL

SEQ ID NO: 123139 - protein, 9 aa, Homo sapiens
WGLLLALLP

SEQ ID NO: 123140 - protein, 9 aa, Homo sapiens
GLLLALLPP

SEQ ID NO: 123141 - protein, 9 aa, Homo sapiens
LLLALLPPG

SEQ ID NO: 123142 - protein, 9 aa, Homo sapiens
LLALLPPGA

SEQ ID NO: 123143 - protein, 9 aa, Homo sapiens
LALLPPGAA

SEQ ID NO: 123144 - protein, 9 aa, Homo sapiens
ALLPPGAAS

SEQ ID NO: 123145 - protein, 9 aa, Homo sapiens
LLPPGAAST

SEQ ID NO: 123146 - protein, 9 aa, Homo sapiens
LPPGAASTQ

SEQ ID NO: 123147 - protein, 9 aa, Homo sapiens
PPGAASTQV

SEQ ID NO: 123148 - protein, 9 aa, Homo sapiens
PGAASTQVC

SEQ ID NO: 123149 - protein, 9 aa, Homo sapiens
GAASTQVCT

SEQ ID NO: 123150 - protein, 9 aa, Homo sapiens
AASTQVCTG

SEQ ID NO: 123151 - protein, 9 aa, Homo sapiens
ASTQVCTGT

SEQ ID NO: 123152 - protein, 9 aa, Homo sapiens
STQVCTGTD

SEQ ID NO: 123153 - protein, 9 aa, Homo sapiens
TQVCTGTDM

SEQ ID NO: 123154 - protein, 9 aa, Homo sapiens
QVCTGTDMK

SEQ ID NO: 123155 - protein, 9 aa, Homo sapiens
VCTGTDMKL

SEQ ID NO: 123156 - protein, 9 aa, Homo sapiens
CTGTDMKLR

SEQ ID NO: 123157 - protein, 9 aa, Homo sapiens
TGTDMKLRL

SEQ ID NO: 123158 - protein, 9 aa, Homo sapiens
GTDMKLRLP

SEQ ID NO: 123159 - protein, 9 aa, Homo sapiens
TDMKLRLPA

SEQ ID NO: 123160 - protein, 9 aa, Homo sapiens
DMKLRLPAS

SEQ ID NO: 123161 - protein, 9 aa, Homo sapiens
MKLRLPASP

SEQ ID NO: 123162 - protein, 9 aa, Homo sapiens
KLRLPASPE

SEQ ID NO: 123163 - protein, 9 aa, Homo sapiens
LRLPASPET

SEQ ID NO: 123164 - protein, 9 aa, Homo sapiens
RLPASPETH

SEQ ID NO: 123165 - protein, 9 aa, Homo sapiens
LPASPETHL

SEQ ID NO: 123166 - protein, 9 aa, Homo sapiens
PASPETHLD

SEQ ID NO: 123167 - protein, 9 aa, Homo sapiens
ASPETHLDM

SEQ ID NO: 123168 - protein, 9 aa, Homo sapiens
SPETHLDML

SEQ ID NO: 123169 - protein, 9 aa, Homo sapiens
PETHLDMLR

SEQ ID NO: 123170 - protein, 9 aa, Homo sapiens
ETHLDMLRH

SEQ ID NO: 123171 - protein, 9 aa, Homo sapiens
THLDMLRHL

SEQ ID NO: 123172 - protein, 9 aa, Homo sapiens
HLDMLRHLY

SEQ ID NO: 123173 - protein, 9 aa, Homo sapiens
LDMLRHLYQ

SEQ ID NO: 123174 - protein, 9 aa, Homo sapiens
DMLRHLYQG

SEQ ID NO: 123175 - protein, 9 aa, Homo sapiens
MLRHLYQGC

SEQ ID NO: 123176 - protein, 9 aa, Homo sapiens
LRHLYQGCQ

SEQ ID NO: 123177 - protein, 9 aa, Homo sapiens
RHLYQGCQV

SEQ ID NO: 123178 - protein, 9 aa, Homo sapiens
HLYQGCQVV

SEQ ID NO: 123179 - protein, 9 aa, Homo sapiens
LYQGCQVVQ

SEQ ID NO: 123180 - protein, 9 aa, Homo sapiens
YQGCQVVQG

SEQ ID NO: 123181 - protein, 9 aa, Homo sapiens
QGCQVVQGN

SEQ ID NO: 123182 - protein, 9 aa, Homo sapiens
GCQVVQGNL

SEQ ID NO: 123183 - protein, 9 aa, Homo sapiens
CQVVQGNLE

SEQ ID NO: 123184 - protein, 9 aa, Homo sapiens
QVVQGNLEL

SEQ ID NO: 123185 - protein, 9 aa, Homo sapiens
VVQGNLELT

SEQ ID NO: 123186 - protein, 9 aa, Homo sapiens
VQGNLELTY

SEQ ID NO: 123187 - protein, 9 aa, Homo sapiens
QGNLELTYL

SEQ ID NO: 123188 - protein, 9 aa, Homo sapiens
GNLELTYLP

SEQ ID NO: 123189 - protein, 9 aa, Homo sapiens
NLELTYLPT

SEQ ID NO: 123190 - protein, 9 aa, Homo sapiens
LELTYLPTN

SEQ ID NO: 123191 - protein, 9 aa, Homo sapiens
ELTYLPTNA

SEQ ID NO: 123192 - protein, 9 aa, Homo sapiens
LTYLPTNAS

SEQ ID NO: 123193 - protein, 9 aa, Homo sapiens
TYLPTNASL

SEQ ID NO: 123194 - protein, 9 aa, Homo sapiens
YLPTNASLS

SEQ ID NO: 123195 - protein, 9 aa, Homo sapiens
LPTNASLSF

SEQ ID NO: 123196 - protein, 9 aa, Homo sapiens
PTNASLSFL

SEQ ID NO: 123197 - protein, 9 aa, Homo sapiens
TNASLSFLQ

SEQ ID NO: 123198 - protein, 9 aa, Homo sapiens
NASLSFLQD

SEQ ID NO: 123199 - protein, 9 aa, Homo sapiens
ASLSFLQDI

SEQ ID NO: 123200 - protein, 9 aa, Homo sapiens
SLSFLQDIQ

SEQ ID NO: 123201 - protein, 9 aa, Homo sapiens
LSFLQDIQE

SEQ ID NO: 123202 - protein, 9 aa, Homo sapiens
SFLQDIQEV

SEQ ID NO: 123203 - protein, 9 aa, Homo sapiens
FLQDIQEVQ

SEQ ID NO: 123204 - protein, 9 aa, Homo sapiens
LQDIQEVQG

SEQ ID NO: 123205 - protein, 9 aa, Homo sapiens
QDIQEVQGY

SEQ ID NO: 123206 - protein, 9 aa, Homo sapiens
DIQEVQGYV

SEQ ID NO: 123207 - protein, 9 aa, Homo sapiens
IQEVQGYVL

SEQ ID NO: 123208 - protein, 9 aa, Homo sapiens
QEVQGYVLI

SEQ ID NO: 123209 - protein, 9 aa, Homo sapiens
EVQGYVLIA

SEQ ID NO: 123210 - protein, 9 aa, Homo sapiens
VQGYVLIAH

SEQ ID NO: 123211 - protein, 9 aa, Homo sapiens
QGYVLIAHN

SEQ ID NO: 123212 - protein, 9 aa, Homo sapiens
GYVLIAHNQ

SEQ ID NO: 123213 - protein, 9 aa, Homo sapiens
YVLIAHNQV

SEQ ID NO: 123214 - protein, 9 aa, Homo sapiens
VLIAHNQVR

SEQ ID NO: 123215 - protein, 9 aa, Homo sapiens
LIAHNQVRQ

SEQ ID NO: 123216 - protein, 9 aa, Homo sapiens
IAHNQVRQV

SEQ ID NO: 123217 - protein, 9 aa, Homo sapiens
AHNQVRQVP

SEQ ID NO: 123218 - protein, 9 aa, Homo sapiens
HNQVRQVPL

SEQ ID NO: 123219 - protein, 9 aa, Homo sapiens
NQVRQVPLQ

SEQ ID NO: 123220 - protein, 9 aa, Homo sapiens
QVRQVPLQR

SEQ ID NO: 123221 - protein, 9 aa, Homo sapiens
VRQVPLQRL

SEQ ID NO: 123222 - protein, 9 aa, Homo sapiens
RQVPLQRLR

SEQ ID NO: 123223 - protein, 9 aa, Homo sapiens
QVPLQRLRI

SEQ ID NO: 123224 - protein, 9 aa, Homo sapiens
VPLQRLRIV

SEQ ID NO: 123225 - protein, 9 aa, Homo sapiens
PLQRLRIVR

SEQ ID NO: 123226 - protein, 9 aa, Homo sapiens
LQRLRIVRG

SEQ ID NO: 123227 - protein, 9 aa, Homo sapiens
QRLRIVRGT

SEQ ID NO: 123228 - protein, 9 aa, Homo sapiens
RLRIVRGTQ

SEQ ID NO: 123229 - protein, 9 aa, Homo sapiens
LRIVRGTQL

SEQ ID NO: 123230 - protein, 9 aa, Homo sapiens
RIVRGTQLF

SEQ ID NO: 123231 - protein, 9 aa, Homo sapiens
IVRGTQLFE

SEQ ID NO: 123232 - protein, 9 aa, Homo sapiens
VRGTQLFED

SEQ ID NO: 123233 - protein, 9 aa, Homo sapiens
RGTQLFEDN

SEQ ID NO: 123234 - protein, 9 aa, Homo sapiens
GTQLFEDNY

SEQ ID NO: 123235 - protein, 9 aa, Homo sapiens
TQLFEDNYA

SEQ ID NO: 123236 - protein, 9 aa, Homo sapiens
QLFEDNYAL

SEQ ID NO: 123237 - protein, 9 aa, Homo sapiens
LFEDNYALA

SEQ ID NO: 123238 - protein, 9 aa, Homo sapiens
FEDNYALAV

SEQ ID NO: 123239 - protein, 9 aa, Homo sapiens
EDNYALAVL

SEQ ID NO: 123240 - protein, 9 aa, Homo sapiens
DNYALAVLD

SEQ ID NO: 123241 - protein, 9 aa, Homo sapiens
NYALAVLDN

SEQ ID NO: 123242 - protein, 9 aa, Homo sapiens
YALAVLDNG

SEQ ID NO: 123243 - protein, 9 aa, Homo sapiens
ALAVLDNGD

SEQ ID NO: 123244 - protein, 9 aa, Homo sapiens
LAVLDNGDP

SEQ ID NO: 123245 - protein, 9 aa, Homo sapiens
AVLDNGDPL

SEQ ID NO: 123246 - protein, 9 aa, Homo sapiens
VLDNGDPLN

SEQ ID NO: 123247 - protein, 9 aa, Homo sapiens
LDNGDPLNN

SEQ ID NO: 123248 - protein, 9 aa, Homo sapiens
DNGDPLNNT

SEQ ID NO: 123249 - protein, 9 aa, Homo sapiens
NGDPLNNTT

SEQ ID NO: 123250 - protein, 9 aa, Homo sapiens
GDPLNNTTP

SEQ ID NO: 123251 - protein, 9 aa, Homo sapiens
DPLNNTTPV

SEQ ID NO: 123252 - protein, 9 aa, Homo sapiens
PLNNTTPVT

SEQ ID NO: 123253 - protein, 9 aa, Homo sapiens
LNNTTPVTG

SEQ ID NO: 123254 - protein, 9 aa, Homo sapiens
NNTTPVTGA

SEQ ID NO: 123255 - protein, 9 aa, Homo sapiens
NTTPVTGAS

SEQ ID NO: 123256 - protein, 9 aa, Homo sapiens
TTPVTGASP

SEQ ID NO: 123257 - protein, 9 aa, Homo sapiens
TPVTGASPG

SEQ ID NO: 123258 - protein, 9 aa, Homo sapiens
PVTGASPGG

SEQ ID NO: 123259 - protein, 9 aa, Homo sapiens
VTGASPGGL

SEQ ID NO: 123260 - protein, 9 aa, Homo sapiens
TGASPGGLR

SEQ ID NO: 123261 - protein, 9 aa, Homo sapiens
GASPGGLRE

SEQ ID NO: 123262 - protein, 9 aa, Homo sapiens
ASPGGLREL

SEQ ID NO: 123263 - protein, 9 aa, Homo sapiens
SPGGLRELQ

SEQ ID NO: 123264 - protein, 9 aa, Homo sapiens
PGGLRELQL

SEQ ID NO: 123265 - protein, 9 aa, Homo sapiens
GGLRELQLR

SEQ ID NO: 123266 - protein, 9 aa, Homo sapiens
GLRELQLRS

SEQ ID NO: 123267 - protein, 9 aa, Homo sapiens
LRELQLRSL

SEQ ID NO: 123268 - protein, 9 aa, Homo sapiens
RELQLRSLT

SEQ ID NO: 123269 - protein, 9 aa, Homo sapiens
ELQLRSLTE

SEQ ID NO: 123270 - protein, 9 aa, Homo sapiens
LQLRSLTEI

SEQ ID NO: 123271 - protein, 9 aa, Homo sapiens
QLRSLTEIL

SEQ ID NO: 123272 - protein, 9 aa, Homo sapiens
LRSLTEILK

SEQ ID NO: 123273 - protein, 9 aa, Homo sapiens
RSLTEILKG

SEQ ID NO: 123274 - protein, 9 aa, Homo sapiens
SLTEILKGG

SEQ ID NO: 123275 - protein, 9 aa, Homo sapiens
LTEILKGGV

SEQ ID NO: 123276 - protein, 9 aa, Homo sapiens
TEILKGGVL

SEQ ID NO: 123277 - protein, 9 aa, Homo sapiens
EILKGGVLI

SEQ ID NO: 123278 - protein, 9 aa, Homo sapiens
ILKGGVLIQ

SEQ ID NO: 123279 - protein, 9 aa, Homo sapiens
LKGGVLIQR

SEQ ID NO: 123280 - protein, 9 aa, Homo sapiens
KGGVLIQRN

SEQ ID NO: 123281 - protein, 9 aa, Homo sapiens
GGVLIQRNP

SEQ ID NO: 123282 - protein, 9 aa, Homo sapiens
GVLIQRNPQ

SEQ ID NO: 123283 - protein, 9 aa, Homo sapiens
VLIQRNPQL

SEQ ID NO: 123284 - protein, 9 aa, Homo sapiens
LIQRNPQLC

SEQ ID NO: 123285 - protein, 9 aa, Homo sapiens
IQRNPQLCY

SEQ ID NO: 123286 - protein, 9 aa, Homo sapiens
QRNPQLCYQ

SEQ ID NO: 123287 - protein, 9 aa, Homo sapiens
RNPQLCYQD

SEQ ID NO: 123288 - protein, 9 aa, Homo sapiens
NPQLCYQDT

SEQ ID NO: 123289 - protein, 9 aa, Homo sapiens
PQLCYQDTI

SEQ ID NO: 123290 - protein, 9 aa, Homo sapiens
QLCYQDTIL

SEQ ID NO: 123291 - protein, 9 aa, Homo sapiens
LCYQDTILW

SEQ ID NO: 123292 - protein, 9 aa, Homo sapiens
CYQDTILWK

SEQ ID NO: 123293 - protein, 9 aa, Homo sapiens
YQDTILWKD

SEQ ID NO: 123294 - protein, 9 aa, Homo sapiens
QDTILWKDI

SEQ ID NO: 123295 - protein, 9 aa, Homo sapiens
DTILWKDIF

SEQ ID NO: 123296 - protein, 9 aa, Homo sapiens
TILWKDIFH

SEQ ID NO: 123297 - protein, 9 aa, Homo sapiens
ILWKDIFHK

SEQ ID NO: 123298 - protein, 9 aa, Homo sapiens
LWKDIFHKN

SEQ ID NO: 123299 - protein, 9 aa, Homo sapiens
WKDIFHKNN

SEQ ID NO: 123300 - protein, 9 aa, Homo sapiens
KDIFHKNNQ

SEQ ID NO: 123301 - protein, 9 aa, Homo sapiens
DIFHKNNQL

SEQ ID NO: 123302 - protein, 9 aa, Homo sapiens
IFHKNNQLA

SEQ ID NO: 123303 - protein, 9 aa, Homo sapiens
FHKNNQLAL

SEQ ID NO: 123304 - protein, 9 aa, Homo sapiens
HKNNQLALT

SEQ ID NO: 123305 - protein, 9 aa, Homo sapiens
KNNQLALTL

SEQ ID NO: 123306 - protein, 9 aa, Homo sapiens
NNQLALTLI

SEQ ID NO: 123307 - protein, 9 aa, Homo sapiens
NQLALTLID

SEQ ID NO: 123308 - protein, 9 aa, Homo sapiens
QLALTLIDT

SEQ ID NO: 123309 - protein, 9 aa, Homo sapiens
LALTLIDTN

SEQ ID NO: 123310 - protein, 9 aa, Homo sapiens
ALTLIDTNR

SEQ ID NO: 123311 - protein, 9 aa, Homo sapiens
LTLIDTNRS

SEQ ID NO: 123312 - protein, 9 aa, Homo sapiens
TLIDTNRSR

SEQ ID NO: 123313 - protein, 9 aa, Homo sapiens
LIDTNRSRA

SEQ ID NO: 123314 - protein, 9 aa, Homo sapiens
IDTNRSRAC

SEQ ID NO: 123315 - protein, 9 aa, Homo sapiens
DTNRSRACH

SEQ ID NO: 123316 - protein, 9 aa, Homo sapiens
TNRSRACHP

SEQ ID NO: 123317 - protein, 9 aa, Homo sapiens
NRSRACHPC

SEQ ID NO: 123318 - protein, 9 aa, Homo sapiens
RSRACHPCS

SEQ ID NO: 123319 - protein, 9 aa, Homo sapiens
SRACHPCSP

SEQ ID NO: 123320 - protein, 9 aa, Homo sapiens
RACHPCSPM

SEQ ID NO: 123321 - protein, 9 aa, Homo sapiens
ACHPCSPMC

SEQ ID NO: 123322 - protein, 9 aa, Homo sapiens
CHPCSPMCK

SEQ ID NO: 123323 - protein, 9 aa, Homo sapiens
HPCSPMCKG

SEQ ID NO: 123324 - protein, 9 aa, Homo sapiens
PCSPMCKGS

SEQ ID NO: 123325 - protein, 9 aa, Homo sapiens
CSPMCKGSR

SEQ ID NO: 123326 - protein, 9 aa, Homo sapiens
SPMCKGSRC

SEQ ID NO: 123327 - protein, 9 aa, Homo sapiens
PMCKGSRCW

SEQ ID NO: 123328 - protein, 9 aa, Homo sapiens
MCKGSRCWG

SEQ ID NO: 123329 - protein, 9 aa, Homo sapiens
CKGSRCWGE

SEQ ID NO: 123330 - protein, 9 aa, Homo sapiens
KGSRCWGES

SEQ ID NO: 123331 - protein, 9 aa, Homo sapiens
GSRCWGESS

SEQ ID NO: 123332 - protein, 9 aa, Homo sapiens
SRCWGESSE

SEQ ID NO: 123333 - protein, 9 aa, Homo sapiens
RCWGESSED

SEQ ID NO: 123334 - protein, 9 aa, Homo sapiens
CWGESSEDC

SEQ ID NO: 123335 - protein, 9 aa, Homo sapiens
WGESSEDCQ

SEQ ID NO: 123336 - protein, 9 aa, Homo sapiens
GESSEDCQS

SEQ ID NO: 123337 - protein, 9 aa, Homo sapiens
ESSEDCQSL

SEQ ID NO: 123338 - protein, 9 aa, Homo sapiens
SSEDCQSLT

SEQ ID NO: 123339 - protein, 9 aa, Homo sapiens
SEDCQSLTR

SEQ ID NO: 123340 - protein, 9 aa, Homo sapiens
EDCQSLTRT

SEQ ID NO: 123341 - protein, 9 aa, Homo sapiens
DCQSLTRTV

SEQ ID NO: 123342 - protein, 9 aa, Homo sapiens
CQSLTRTVC

SEQ ID NO: 123343 - protein, 9 aa, Homo sapiens
QSLTRTVCA

SEQ ID NO: 123344 - protein, 9 aa, Homo sapiens
SLTRTVCAG

SEQ ID NO: 123345 - protein, 9 aa, Homo sapiens
LTRTVCAGG

SEQ ID NO: 123346 - protein, 9 aa, Homo sapiens
TRTVCAGGC

SEQ ID NO: 123347 - protein, 9 aa, Homo sapiens
RTVCAGGCA

SEQ ID NO: 123348 - protein, 9 aa, Homo sapiens
TVCAGGCAR

SEQ ID NO: 123349 - protein, 9 aa, Homo sapiens
VCAGGCARC

SEQ ID NO: 123350 - protein, 9 aa, Homo sapiens
CAGGCARCK

SEQ ID NO: 123351 - protein, 9 aa, Homo sapiens
AGGCARCKG

SEQ ID NO: 123352 - protein, 9 aa, Homo sapiens
GGCARCKGP

SEQ ID NO: 123353 - protein, 9 aa, Homo sapiens
GCARCKGPL

SEQ ID NO: 123354 - protein, 9 aa, Homo sapiens
CARCKGPLP

SEQ ID NO: 123355 - protein, 9 aa, Homo sapiens
ARCKGPLPT

SEQ ID NO: 123356 - protein, 9 aa, Homo sapiens
RCKGPLPTD

SEQ ID NO: 123357 - protein, 9 aa, Homo sapiens
CKGPLPTDC

SEQ ID NO: 123358 - protein, 9 aa, Homo sapiens
KGPLPTDCC

SEQ ID NO: 123359 - protein, 9 aa, Homo sapiens
GPLPTDCCH

SEQ ID NO: 123360 - protein, 9 aa, Homo sapiens
PLPTDCCHE

SEQ ID NO: 123361 - protein, 9 aa, Homo sapiens
LPTDCCHEQ

SEQ ID NO: 123362 - protein, 9 aa, Homo sapiens
PTDCCHEQC

SEQ ID NO: 123363 - protein, 9 aa, Homo sapiens
TDCCHEQCA

SEQ ID NO: 123364 - protein, 9 aa, Homo sapiens
DCCHEQCAA

SEQ ID NO: 123365 - protein, 9 aa, Homo sapiens
CCHEQCAAG

SEQ ID NO: 123366 - protein, 9 aa, Homo sapiens
CHEQCAAGC

SEQ ID NO: 123367 - protein, 9 aa, Homo sapiens
HEQCAAGCT

SEQ ID NO: 123368 - protein, 9 aa, Homo sapiens
EQCAAGCTG

SEQ ID NO: 123369 - protein, 9 aa, Homo sapiens
QCAAGCTGP

SEQ ID NO: 123370 - protein, 9 aa, Homo sapiens
CAAGCTGPK

SEQ ID NO: 123371 - protein, 9 aa, Homo sapiens
AAGCTGPKH

SEQ ID NO: 123372 - protein, 9 aa, Homo sapiens
AGCTGPKHS

SEQ ID NO: 123373 - protein, 9 aa, Homo sapiens
GCTGPKHSD

SEQ ID NO: 123374 - protein, 9 aa, Homo sapiens
CTGPKHSDC

SEQ ID NO: 123375 - protein, 9 aa, Homo sapiens
TGPKHSDCL

SEQ ID NO: 123376 - protein, 9 aa, Homo sapiens
GPKHSDCLA

SEQ ID NO: 123377 - protein, 9 aa, Homo sapiens
PKHSDCLAC

SEQ ID NO: 123378 - protein, 9 aa, Homo sapiens
KHSDCLACL

SEQ ID NO: 123379 - protein, 9 aa, Homo sapiens
HSDCLACLH

SEQ ID NO: 123380 - protein, 9 aa, Homo sapiens
SDCLACLHF

SEQ ID NO: 123381 - protein, 9 aa, Homo sapiens
DCLACLHFN

SEQ ID NO: 123382 - protein, 9 aa, Homo sapiens
CLACLHFNH

SEQ ID NO: 123383 - protein, 9 aa, Homo sapiens
LACLHFNHS

SEQ ID NO: 123384 - protein, 9 aa, Homo sapiens
ACLHFNHSG

SEQ ID NO: 123385 - protein, 9 aa, Homo sapiens
CLHFNHSGI

SEQ ID NO: 123386 - protein, 9 aa, Homo sapiens
LHFNHSGIC

SEQ ID NO: 123387 - protein, 9 aa, Homo sapiens
HFNHSGICE

SEQ ID NO: 123388 - protein, 9 aa, Homo sapiens
FNHSGICEL

SEQ ID NO: 123389 - protein, 9 aa, Homo sapiens
NHSGICELH

SEQ ID NO: 123390 - protein, 9 aa, Homo sapiens
HSGICELHC

SEQ ID NO: 123391 - protein, 9 aa, Homo sapiens
SGICELHCP

SEQ ID NO: 123392 - protein, 9 aa, Homo sapiens
GICELHCPA

SEQ ID NO: 123393 - protein, 9 aa, Homo sapiens
ICELHCPAL

SEQ ID NO: 123394 - protein, 9 aa, Homo sapiens
CELHCPALV

SEQ ID NO: 123395 - protein, 9 aa, Homo sapiens
ELHCPALVT

SEQ ID NO: 123396 - protein, 9 aa, Homo sapiens
LHCPALVTY

SEQ ID NO: 123397 - protein, 9 aa, Homo sapiens
HCPALVTYN

SEQ ID NO: 123398 - protein, 9 aa, Homo sapiens
CPALVTYNT

SEQ ID NO: 123399 - protein, 9 aa, Homo sapiens
PALVTYNTD

SEQ ID NO: 123400 - protein, 9 aa, Homo sapiens
ALVTYNTDT

SEQ ID NO: 123401 - protein, 9 aa, Homo sapiens
LVTYNTDTF

SEQ ID NO: 123402 - protein, 9 aa, Homo sapiens
VTYNTDTFE

SEQ ID NO: 123403 - protein, 9 aa, Homo sapiens
TYNTDTFES

SEQ ID NO: 123404 - protein, 9 aa, Homo sapiens
YNTDTFESM

SEQ ID NO: 123405 - protein, 9 aa, Homo sapiens
NTDTFESMP

SEQ ID NO: 123406 - protein, 9 aa, Homo sapiens
TDTFESMPN

SEQ ID NO: 123407 - protein, 9 aa, Homo sapiens
DTFESMPNP

SEQ ID NO: 123408 - protein, 9 aa, Homo sapiens
TFESMPNPE

SEQ ID NO: 123409 - protein, 9 aa, Homo sapiens
FESMPNPEG

SEQ ID NO: 123410 - protein, 9 aa, Homo sapiens
ESMPNPEGR

SEQ ID NO: 123411 - protein, 9 aa, Homo sapiens
SMPNPEGRY

SEQ ID NO: 123412 - protein, 9 aa, Homo sapiens
MPNPEGRYT

SEQ ID NO: 123413 - protein, 9 aa, Homo sapiens
PNPEGRYTF

SEQ ID NO: 123414 - protein, 9 aa, Homo sapiens
NPEGRYTFG

SEQ ID NO: 123415 - protein, 9 aa, Homo sapiens
PEGRYTFGA

SEQ ID NO: 123416 - protein, 9 aa, Homo sapiens
EGRYTFGAS

SEQ ID NO: 123417 - protein, 9 aa, Homo sapiens
GRYTFGASC

SEQ ID NO: 123418 - protein, 9 aa, Homo sapiens
RYTFGASCV

SEQ ID NO: 123419 - protein, 9 aa, Homo sapiens
YTFGASCVT

SEQ ID NO: 123420 - protein, 9 aa, Homo sapiens
TFGASCVTA

SEQ ID NO: 123421 - protein, 9 aa, Homo sapiens
FGASCVTAC

SEQ ID NO: 123422 - protein, 9 aa, Homo sapiens
GASCVTACP

SEQ ID NO: 123423 - protein, 9 aa, Homo sapiens
ASCVTACPY

SEQ ID NO: 123424 - protein, 9 aa, Homo sapiens
SCVTACPYN

SEQ ID NO: 123425 - protein, 9 aa, Homo sapiens
CVTACPYNY

SEQ ID NO: 123426 - protein, 9 aa, Homo sapiens
VTACPYNYL

SEQ ID NO: 123427 - protein, 9 aa, Homo sapiens
TACPYNYLS

SEQ ID NO: 123428 - protein, 9 aa, Homo sapiens
ACPYNYLST

SEQ ID NO: 123429 - protein, 9 aa, Homo sapiens
CPYNYLSTD

SEQ ID NO: 123430 - protein, 9 aa, Homo sapiens
PYNYLSTDV

SEQ ID NO: 123431 - protein, 9 aa, Homo sapiens
YNYLSTDVG

SEQ ID NO: 123432 - protein, 9 aa, Homo sapiens
NYLSTDVGS

SEQ ID NO: 123433 - protein, 9 aa, Homo sapiens
YLSTDVGSC

SEQ ID NO: 123434 - protein, 9 aa, Homo sapiens
LSTDVGSCT

SEQ ID NO: 123435 - protein, 9 aa, Homo sapiens
STDVGSCTL

SEQ ID NO: 123436 - protein, 9 aa, Homo sapiens
TDVGSCTLV

SEQ ID NO: 123437 - protein, 9 aa, Homo sapiens
DVGSCTLVC

SEQ ID NO: 123438 - protein, 9 aa, Homo sapiens
VGSCTLVCP

SEQ ID NO: 123439 - protein, 9 aa, Homo sapiens
GSCTLVCPL

SEQ ID NO: 123440 - protein, 9 aa, Homo sapiens
SCTLVCPLH

SEQ ID NO: 123441 - protein, 9 aa, Homo sapiens
CTLVCPLHN

SEQ ID NO: 123442 - protein, 9 aa, Homo sapiens
TLVCPLHNQ

SEQ ID NO: 123443 - protein, 9 aa, Homo sapiens
LVCPLHNQE

SEQ ID NO: 123444 - protein, 9 aa, Homo sapiens
VCPLHNQEV

SEQ ID NO: 123445 - protein, 9 aa, Homo sapiens
CPLHNQEVT

SEQ ID NO: 123446 - protein, 9 aa, Homo sapiens
PLHNQEVTA

SEQ ID NO: 123447 - protein, 9 aa, Homo sapiens
LHNQEVTAE

SEQ ID NO: 123448 - protein, 9 aa, Homo sapiens
HNQEVTAED

SEQ ID NO: 123449 - protein, 9 aa, Homo sapiens
NQEVTAEDG

SEQ ID NO: 123450 - protein, 9 aa, Homo sapiens
QEVTAEDGT

SEQ ID NO: 123451 - protein, 9 aa, Homo sapiens
EVTAEDGTQ

SEQ ID NO: 123452 - protein, 9 aa, Homo sapiens
VTAEDGTQR

SEQ ID NO: 123453 - protein, 9 aa, Homo sapiens
TAEDGTQRC

SEQ ID NO: 123454 - protein, 9 aa, Homo sapiens
AEDGTQRCE

SEQ ID NO: 123455 - protein, 9 aa, Homo sapiens
EDGTQRCEK

SEQ ID NO: 123456 - protein, 9 aa, Homo sapiens
DGTQRCEKC

SEQ ID NO: 123457 - protein, 9 aa, Homo sapiens
GTQRCEKCS

SEQ ID NO: 123458 - protein, 9 aa, Homo sapiens
TQRCEKCSK

SEQ ID NO: 123459 - protein, 9 aa, Homo sapiens
QRCEKCSKP

SEQ ID NO: 123460 - protein, 9 aa, Homo sapiens
RCEKCSKPC

SEQ ID NO: 123461 - protein, 9 aa, Homo sapiens
CEKCSKPCA

SEQ ID NO: 123462 - protein, 9 aa, Homo sapiens
EKCSKPCAR

SEQ ID NO: 123463 - protein, 9 aa, Homo sapiens
KCSKPCARV

SEQ ID NO: 123464 - protein, 9 aa, Homo sapiens
CSKPCARVC

SEQ ID NO: 123465 - protein, 9 aa, Homo sapiens
SKPCARVCY

SEQ ID NO: 123466 - protein, 9 aa, Homo sapiens
KPCARVCYG

SEQ ID NO: 123467 - protein, 9 aa, Homo sapiens
PCARVCYGL

SEQ ID NO: 123468 - protein, 9 aa, Homo sapiens
CARVCYGLG

SEQ ID NO: 123469 - protein, 9 aa, Homo sapiens
ARVCYGLGM

SEQ ID NO: 123470 - protein, 9 aa, Homo sapiens
RVCYGLGME

SEQ ID NO: 123471 - protein, 9 aa, Homo sapiens
VCYGLGMEH

SEQ ID NO: 123472 - protein, 9 aa, Homo sapiens
CYGLGMEHL

SEQ ID NO: 123473 - protein, 9 aa, Homo sapiens
YGLGMEHLR

SEQ ID NO: 123474 - protein, 9 aa, Homo sapiens
GLGMEHLRE

SEQ ID NO: 123475 - protein, 9 aa, Homo sapiens
LGMEHLREV

SEQ ID NO: 123476 - protein, 9 aa, Homo sapiens
GMEHLREVR

SEQ ID NO: 123477 - protein, 9 aa, Homo sapiens
MEHLREVRA

SEQ ID NO: 123478 - protein, 9 aa, Homo sapiens
EHLREVRAV

SEQ ID NO: 123479 - protein, 9 aa, Homo sapiens
HLREVRAVT

SEQ ID NO: 123480 - protein, 9 aa, Homo sapiens
LREVRAVTS

SEQ ID NO: 123481 - protein, 9 aa, Homo sapiens
REVRAVTSA

SEQ ID NO: 123482 - protein, 9 aa, Homo sapiens
EVRAVTSAN

SEQ ID NO: 123483 - protein, 9 aa, Homo sapiens
VRAVTSANI

SEQ ID NO: 123484 - protein, 9 aa, Homo sapiens
RAVTSANIQ

SEQ ID NO: 123485 - protein, 9 aa, Homo sapiens
AVTSANIQE

SEQ ID NO: 123486 - protein, 9 aa, Homo sapiens
VTSANIQEF

SEQ ID NO: 123487 - protein, 9 aa, Homo sapiens
TSANIQEFA

SEQ ID NO: 123488 - protein, 9 aa, Homo sapiens
SANIQEFAG

SEQ ID NO: 123489 - protein, 9 aa, Homo sapiens
ANIQEFAGC

SEQ ID NO: 123490 - protein, 9 aa, Homo sapiens
NIQEFAGCK

SEQ ID NO: 123491 - protein, 9 aa, Homo sapiens
IQEFAGCKK

SEQ ID NO: 123492 - protein, 9 aa, Homo sapiens
QEFAGCKKI

SEQ ID NO: 123493 - protein, 9 aa, Homo sapiens
EFAGCKKIF

SEQ ID NO: 123494 - protein, 9 aa, Homo sapiens
FAGCKKIFG

SEQ ID NO: 123495 - protein, 9 aa, Homo sapiens
AGCKKIFGS

SEQ ID NO: 123496 - protein, 9 aa, Homo sapiens
GCKKIFGSL

SEQ ID NO: 123497 - protein, 9 aa, Homo sapiens
CKKIFGSLA

SEQ ID NO: 123498 - protein, 9 aa, Homo sapiens
KKIFGSLAF

SEQ ID NO: 123499 - protein, 9 aa, Homo sapiens
KIFGSLAFL

SEQ ID NO: 123500 - protein, 9 aa, Homo sapiens
IFGSLAFLP

SEQ ID NO: 123501 - protein, 9 aa, Homo sapiens
FGSLAFLPE

SEQ ID NO: 123502 - protein, 9 aa, Homo sapiens
GSLAFLPES

SEQ ID NO: 123503 - protein, 9 aa, Homo sapiens
SLAFLPESF

SEQ ID NO: 123504 - protein, 9 aa, Homo sapiens
LAFLPESFD

SEQ ID NO: 123505 - protein, 9 aa, Homo sapiens
AFLPESFDG

SEQ ID NO: 123506 - protein, 9 aa, Homo sapiens
FLPESFDGD

SEQ ID NO: 123507 - protein, 9 aa, Homo sapiens
LPESFDGDP

SEQ ID NO: 123508 - protein, 9 aa, Homo sapiens
PESFDGDPA

SEQ ID NO: 123509 - protein, 9 aa, Homo sapiens
ESFDGDPAS

SEQ ID NO: 123510 - protein, 9 aa, Homo sapiens
SFDGDPASN

SEQ ID NO: 123511 - protein, 9 aa, Homo sapiens
FDGDPASNT

SEQ ID NO: 123512 - protein, 9 aa, Homo sapiens
DGDPASNTA

SEQ ID NO: 123513 - protein, 9 aa, Homo sapiens
GDPASNTAP

SEQ ID NO: 123514 - protein, 9 aa, Homo sapiens
DPASNTAPL

SEQ ID NO: 123515 - protein, 9 aa, Homo sapiens
PASNTAPLQ

SEQ ID NO: 123516 - protein, 9 aa, Homo sapiens
ASNTAPLQP

SEQ ID NO: 123517 - protein, 9 aa, Homo sapiens
SNTAPLQPE

SEQ ID NO: 123518 - protein, 9 aa, Homo sapiens
NTAPLQPEQ

SEQ ID NO: 123519 - protein, 9 aa, Homo sapiens
TAPLQPEQL

SEQ ID NO: 123520 - protein, 9 aa, Homo sapiens
APLQPEQLQ

SEQ ID NO: 123521 - protein, 9 aa, Homo sapiens
PLQPEQLQV

SEQ ID NO: 123522 - protein, 9 aa, Homo sapiens
LQPEQLQVF

SEQ ID NO: 123523 - protein, 9 aa, Homo sapiens
QPEQLQVFE

SEQ ID NO: 123524 - protein, 9 aa, Homo sapiens
PEQLQVFET

SEQ ID NO: 123525 - protein, 9 aa, Homo sapiens
EQLQVFETL

SEQ ID NO: 123526 - protein, 9 aa, Homo sapiens
QLQVFETLE

SEQ ID NO: 123527 - protein, 9 aa, Homo sapiens
LQVFETLEE

SEQ ID NO: 123528 - protein, 9 aa, Homo sapiens
QVFETLEEI

SEQ ID NO: 123529 - protein, 9 aa, Homo sapiens
VFETLEEIT

SEQ ID NO: 123530 - protein, 9 aa, Homo sapiens
FETLEEITG

SEQ ID NO: 123531 - protein, 9 aa, Homo sapiens
ETLEEITGY

SEQ ID NO: 123532 - protein, 9 aa, Homo sapiens
TLEEITGYL

SEQ ID NO: 123533 - protein, 9 aa, Homo sapiens
LEEITGYLY

SEQ ID NO: 123534 - protein, 9 aa, Homo sapiens
EEITGYLYI

SEQ ID NO: 123535 - protein, 9 aa, Homo sapiens
EITGYLYIS

SEQ ID NO: 123536 - protein, 9 aa, Homo sapiens
ITGYLYISA

SEQ ID NO: 123537 - protein, 9 aa, Homo sapiens
TGYLYISAW

SEQ ID NO: 123538 - protein, 9 aa, Homo sapiens
GYLYISAWP

SEQ ID NO: 123539 - protein, 9 aa, Homo sapiens
YLYISAWPD

SEQ ID NO: 123540 - protein, 9 aa, Homo sapiens
LYISAWPDS

SEQ ID NO: 123541 - protein, 9 aa, Homo sapiens
YISAWPDSL

SEQ ID NO: 123542 - protein, 9 aa, Homo sapiens
ISAWPDSLP

SEQ ID NO: 123543 - protein, 9 aa, Homo sapiens
SAWPDSLPD

SEQ ID NO: 123544 - protein, 9 aa, Homo sapiens
AWPDSLPDL

SEQ ID NO: 123545 - protein, 9 aa, Homo sapiens
WPDSLPDLS

SEQ ID NO: 123546 - protein, 9 aa, Homo sapiens
PDSLPDLSV

SEQ ID NO: 123547 - protein, 9 aa, Homo sapiens
DSLPDLSVF

SEQ ID NO: 123548 - protein, 9 aa, Homo sapiens
SLPDLSVFQ

SEQ ID NO: 123549 - protein, 9 aa, Homo sapiens
LPDLSVFQN

SEQ ID NO: 123550 - protein, 9 aa, Homo sapiens
PDLSVFQNL

SEQ ID NO: 123551 - protein, 9 aa, Homo sapiens
DLSVFQNLQ

SEQ ID NO: 123552 - protein, 9 aa, Homo sapiens
LSVFQNLQV

SEQ ID NO: 123553 - protein, 9 aa, Homo sapiens
SVFQNLQVI

SEQ ID NO: 123554 - protein, 9 aa, Homo sapiens
VFQNLQVIR

SEQ ID NO: 123555 - protein, 9 aa, Homo sapiens
FQNLQVIRG

SEQ ID NO: 123556 - protein, 9 aa, Homo sapiens
QNLQVIRGR

SEQ ID NO: 123557 - protein, 9 aa, Homo sapiens
NLQVIRGRI

SEQ ID NO: 123558 - protein, 9 aa, Homo sapiens
LQVIRGRIL

SEQ ID NO: 123559 - protein, 9 aa, Homo sapiens
QVIRGRILH

SEQ ID NO: 123560 - protein, 9 aa, Homo sapiens
VIRGRILHN

SEQ ID NO: 123561 - protein, 9 aa, Homo sapiens
IRGRILHNG

SEQ ID NO: 123562 - protein, 9 aa, Homo sapiens
RGRILHNGA

SEQ ID NO: 123563 - protein, 9 aa, Homo sapiens
GRILHNGAY

SEQ ID NO: 123564 - protein, 9 aa, Homo sapiens
RILHNGAYS

SEQ ID NO: 123565 - protein, 9 aa, Homo sapiens
ILHNGAYSL

SEQ ID NO: 123566 - protein, 9 aa, Homo sapiens
LHNGAYSLT

SEQ ID NO: 123567 - protein, 9 aa, Homo sapiens
HNGAYSLTL

SEQ ID NO: 123568 - protein, 9 aa, Homo sapiens
NGAYSLTLQ

SEQ ID NO: 123569 - protein, 9 aa, Homo sapiens
GAYSLTLQG

SEQ ID NO: 123570 - protein, 9 aa, Homo sapiens
AYSLTLQGL

SEQ ID NO: 123571 - protein, 9 aa, Homo sapiens
YSLTLQGLG

SEQ ID NO: 123572 - protein, 9 aa, Homo sapiens
SLTLQGLGI

SEQ ID NO: 123573 - protein, 9 aa, Homo sapiens
LTLQGLGIS

SEQ ID NO: 123574 - protein, 9 aa, Homo sapiens
TLQGLGISW

SEQ ID NO: 123575 - protein, 9 aa, Homo sapiens
LQGLGISWL

SEQ ID NO: 123576 - protein, 9 aa, Homo sapiens
QGLGISWLG

SEQ ID NO: 123577 - protein, 9 aa, Homo sapiens
GLGISWLGL

SEQ ID NO: 123578 - protein, 9 aa, Homo sapiens
LGISWLGLR

SEQ ID NO: 123579 - protein, 9 aa, Homo sapiens
GISWLGLRS

SEQ ID NO: 123580 - protein, 9 aa, Homo sapiens
ISWLGLRSL

SEQ ID NO: 123581 - protein, 9 aa, Homo sapiens
SWLGLRSLR

SEQ ID NO: 123582 - protein, 9 aa, Homo sapiens
WLGLRSLRE

SEQ ID NO: 123583 - protein, 9 aa, Homo sapiens
LGLRSLREL

SEQ ID NO: 123584 - protein, 9 aa, Homo sapiens
GLRSLRELG

SEQ ID NO: 123585 - protein, 9 aa, Homo sapiens
LRSLRELGS

SEQ ID NO: 123586 - protein, 9 aa, Homo sapiens
RSLRELGSG

SEQ ID NO: 123587 - protein, 9 aa, Homo sapiens
SLRELGSGL

SEQ ID NO: 123588 - protein, 9 aa, Homo sapiens
LRELGSGLA

SEQ ID NO: 123589 - protein, 9 aa, Homo sapiens
RELGSGLAL

SEQ ID NO: 123590 - protein, 9 aa, Homo sapiens
ELGSGLALI

SEQ ID NO: 123591 - protein, 9 aa, Homo sapiens
LGSGLALIH

SEQ ID NO: 123592 - protein, 9 aa, Homo sapiens
GSGLALIHH

SEQ ID NO: 123593 - protein, 9 aa, Homo sapiens
SGLALIHHN

SEQ ID NO: 123594 - protein, 9 aa, Homo sapiens
GLALIHHNT

SEQ ID NO: 123595 - protein, 9 aa, Homo sapiens
LALIHHNTH

SEQ ID NO: 123596 - protein, 9 aa, Homo sapiens
ALIHHNTHL

SEQ ID NO: 123597 - protein, 9 aa, Homo sapiens
LIHHNTHLC

SEQ ID NO: 123598 - protein, 9 aa, Homo sapiens
IHHNTHLCF

SEQ ID NO: 123599 - protein, 9 aa, Homo sapiens
HHNTHLCFV

SEQ ID NO: 123600 - protein, 9 aa, Homo sapiens
HNTHLCFVH

SEQ ID NO: 123601 - protein, 9 aa, Homo sapiens
NTHLCFVHT

SEQ ID NO: 123602 - protein, 9 aa, Homo sapiens
THLCFVHTV

SEQ ID NO: 123603 - protein, 9 aa, Homo sapiens
HLCFVHTVP

SEQ ID NO: 123604 - protein, 9 aa, Homo sapiens
LCFVHTVPW

SEQ ID NO: 123605 - protein, 9 aa, Homo sapiens
CFVHTVPWD

SEQ ID NO: 123606 - protein, 9 aa, Homo sapiens
FVHTVPWDQ

SEQ ID NO: 123607 - protein, 9 aa, Homo sapiens
VHTVPWDQL

SEQ ID NO: 123608 - protein, 9 aa, Homo sapiens
HTVPWDQLF

SEQ ID NO: 123609 - protein, 9 aa, Homo sapiens
TVPWDQLFR

SEQ ID NO: 123610 - protein, 9 aa, Homo sapiens
VPWDQLFRN

SEQ ID NO: 123611 - protein, 9 aa, Homo sapiens
PWDQLFRNP

SEQ ID NO: 123612 - protein, 9 aa, Homo sapiens
WDQLFRNPH

SEQ ID NO: 123613 - protein, 9 aa, Homo sapiens
DQLFRNPHQ

SEQ ID NO: 123614 - protein, 9 aa, Homo sapiens
QLFRNPHQA

SEQ ID NO: 123615 - protein, 9 aa, Homo sapiens
LFRNPHQAL

SEQ ID NO: 123616 - protein, 9 aa, Homo sapiens
FRNPHQALL

SEQ ID NO: 123617 - protein, 9 aa, Homo sapiens
RNPHQALLH

SEQ ID NO: 123618 - protein, 9 aa, Homo sapiens
NPHQALLHT

SEQ ID NO: 123619 - protein, 9 aa, Homo sapiens
PHQALLHTA

SEQ ID NO: 123620 - protein, 9 aa, Homo sapiens
HQALLHTAN

SEQ ID NO: 123621 - protein, 9 aa, Homo sapiens
QALLHTANR

SEQ ID NO: 123622 - protein, 9 aa, Homo sapiens
ALLHTANRP

SEQ ID NO: 123623 - protein, 9 aa, Homo sapiens
LLHTANRPE

SEQ ID NO: 123624 - protein, 9 aa, Homo sapiens
LHTANRPED

SEQ ID NO: 123625 - protein, 9 aa, Homo sapiens
HTANRPEDE

SEQ ID NO: 123626 - protein, 9 aa, Homo sapiens
TANRPEDEC

SEQ ID NO: 123627 - protein, 9 aa, Homo sapiens
ANRPEDECV

SEQ ID NO: 123628 - protein, 9 aa, Homo sapiens
NRPEDECVG

SEQ ID NO: 123629 - protein, 9 aa, Homo sapiens
RPEDECVGE

SEQ ID NO: 123630 - protein, 9 aa, Homo sapiens
PEDECVGEG

SEQ ID NO: 123631 - protein, 9 aa, Homo sapiens
EDECVGEGL

SEQ ID NO: 123632 - protein, 9 aa, Homo sapiens
DECVGEGLA

SEQ ID NO: 123633 - protein, 9 aa, Homo sapiens
ECVGEGLAC

SEQ ID NO: 123634 - protein, 9 aa, Homo sapiens
CVGEGLACH

SEQ ID NO: 123635 - protein, 9 aa, Homo sapiens
VGEGLACHQ

SEQ ID NO: 123636 - protein, 9 aa, Homo sapiens
GEGLACHQL

SEQ ID NO: 123637 - protein, 9 aa, Homo sapiens
EGLACHQLC

SEQ ID NO: 123638 - protein, 9 aa, Homo sapiens
GLACHQLCA

SEQ ID NO: 123639 - protein, 9 aa, Homo sapiens
LACHQLCAR

SEQ ID NO: 123640 - protein, 9 aa, Homo sapiens
ACHQLCARG

SEQ ID NO: 123641 - protein, 9 aa, Homo sapiens
CHQLCARGH

SEQ ID NO: 123642 - protein, 9 aa, Homo sapiens
HQLCARGHC

SEQ ID NO: 123643 - protein, 9 aa, Homo sapiens
QLCARGHCW

SEQ ID NO: 123644 - protein, 9 aa, Homo sapiens
LCARGHCWG

SEQ ID NO: 123645 - protein, 9 aa, Homo sapiens
CARGHCWGP

SEQ ID NO: 123646 - protein, 9 aa, Homo sapiens
ARGHCWGPG

SEQ ID NO: 123647 - protein, 9 aa, Homo sapiens
RGHCWGPGP

SEQ ID NO: 123648 - protein, 9 aa, Homo sapiens
GHCWGPGPT

SEQ ID NO: 123649 - protein, 9 aa, Homo sapiens
HCWGPGPTQ

SEQ ID NO: 123650 - protein, 9 aa, Homo sapiens
CWGPGPTQC

SEQ ID NO: 123651 - protein, 9 aa, Homo sapiens
WGPGPTQCV

SEQ ID NO: 123652 - protein, 9 aa, Homo sapiens
GPGPTQCVN

SEQ ID NO: 123653 - protein, 9 aa, Homo sapiens
PGPTQCVNC

SEQ ID NO: 123654 - protein, 9 aa, Homo sapiens
GPTQCVNCS

SEQ ID NO: 123655 - protein, 9 aa, Homo sapiens
PTQCVNCSQ

SEQ ID NO: 123656 - protein, 9 aa, Homo sapiens
TQCVNCSQF

SEQ ID NO: 123657 - protein, 9 aa, Homo sapiens
QCVNCSQFL

SEQ ID NO: 123658 - protein, 9 aa, Homo sapiens
CVNCSQFLR

SEQ ID NO: 123659 - protein, 9 aa, Homo sapiens
VNCSQFLRG

SEQ ID NO: 123660 - protein, 9 aa, Homo sapiens
NCSQFLRGQ

SEQ ID NO: 123661 - protein, 9 aa, Homo sapiens
CSQFLRGQE

SEQ ID NO: 123662 - protein, 9 aa, Homo sapiens
SQFLRGQEC

SEQ ID NO: 123663 - protein, 9 aa, Homo sapiens
QFLRGQECV

SEQ ID NO: 123664 - protein, 9 aa, Homo sapiens
FLRGQECVE

SEQ ID NO: 123665 - protein, 9 aa, Homo sapiens
LRGQECVEE

SEQ ID NO: 123666 - protein, 9 aa, Homo sapiens
RGQECVEEC

SEQ ID NO: 123667 - protein, 9 aa, Homo sapiens
GQECVEECR

SEQ ID NO: 123668 - protein, 9 aa, Homo sapiens
QECVEECRV

SEQ ID NO: 123669 - protein, 9 aa, Homo sapiens
ECVEECRVL

SEQ ID NO: 123670 - protein, 9 aa, Homo sapiens
CVEECRVLQ

SEQ ID NO: 123671 - protein, 9 aa, Homo sapiens
VEECRVLQG

SEQ ID NO: 123672 - protein, 9 aa, Homo sapiens
EECRVLQGL

SEQ ID NO: 123673 - protein, 9 aa, Homo sapiens
ECRVLQGLP

SEQ ID NO: 123674 - protein, 9 aa, Homo sapiens
CRVLQGLPR

SEQ ID NO: 123675 - protein, 9 aa, Homo sapiens
RVLQGLPRE

SEQ ID NO: 123676 - protein, 9 aa, Homo sapiens
VLQGLPREY

SEQ ID NO: 123677 - protein, 9 aa, Homo sapiens
LQGLPREYV

SEQ ID NO: 123678 - protein, 9 aa, Homo sapiens
QGLPREYVN

SEQ ID NO: 123679 - protein, 9 aa, Homo sapiens
GLPREYVNA

SEQ ID NO: 123680 - protein, 9 aa, Homo sapiens
LPREYVNAR

SEQ ID NO: 123681 - protein, 9 aa, Homo sapiens
PREYVNARH

SEQ ID NO: 123682 - protein, 9 aa, Homo sapiens
REYVNARHC

SEQ ID NO: 123683 - protein, 9 aa, Homo sapiens
EYVNARHCL

SEQ ID NO: 123684 - protein, 9 aa, Homo sapiens
YVNARHCLP

SEQ ID NO: 123685 - protein, 9 aa, Homo sapiens
VNARHCLPC

SEQ ID NO: 123686 - protein, 9 aa, Homo sapiens
NARHCLPCH

SEQ ID NO: 123687 - protein, 9 aa, Homo sapiens
ARHCLPCHP

SEQ ID NO: 123688 - protein, 9 aa, Homo sapiens
RHCLPCHPE

SEQ ID NO: 123689 - protein, 9 aa, Homo sapiens
HCLPCHPEC

SEQ ID NO: 123690 - protein, 9 aa, Homo sapiens
CLPCHPECQ

SEQ ID NO: 123691 - protein, 9 aa, Homo sapiens
LPCHPECQP

SEQ ID NO: 123692 - protein, 9 aa, Homo sapiens
PCHPECQPQ

SEQ ID NO: 123693 - protein, 9 aa, Homo sapiens
CHPECQPQN

SEQ ID NO: 123694 - protein, 9 aa, Homo sapiens
HPECQPQNG

SEQ ID NO: 123695 - protein, 9 aa, Homo sapiens
PECQPQNGS

SEQ ID NO: 123696 - protein, 9 aa, Homo sapiens
ECQPQNGSV

SEQ ID NO: 123697 - protein, 9 aa, Homo sapiens
CQPQNGSVT

SEQ ID NO: 123698 - protein, 9 aa, Homo sapiens
QPQNGSVTC

SEQ ID NO: 123699 - protein, 9 aa, Homo sapiens
PQNGSVTCF

SEQ ID NO: 123700 - protein, 9 aa, Homo sapiens
QNGSVTCFG

SEQ ID NO: 123701 - protein, 9 aa, Homo sapiens
NGSVTCFGP

SEQ ID NO: 123702 - protein, 9 aa, Homo sapiens
GSVTCFGPE

SEQ ID NO: 123703 - protein, 9 aa, Homo sapiens
SVTCFGPEA

SEQ ID NO: 123704 - protein, 9 aa, Homo sapiens
VTCFGPEAD

SEQ ID NO: 123705 - protein, 9 aa, Homo sapiens
TCFGPEADQ

SEQ ID NO: 123706 - protein, 9 aa, Homo sapiens
CFGPEADQC

SEQ ID NO: 123707 - protein, 9 aa, Homo sapiens
FGPEADQCV

SEQ ID NO: 123708 - protein, 9 aa, Homo sapiens
GPEADQCVA

SEQ ID NO: 123709 - protein, 9 aa, Homo sapiens
PEADQCVAC

SEQ ID NO: 123710 - protein, 9 aa, Homo sapiens
EADQCVACA

SEQ ID NO: 123711 - protein, 9 aa, Homo sapiens
ADQCVACAH

SEQ ID NO: 123712 - protein, 9 aa, Homo sapiens
DQCVACAHY

SEQ ID NO: 123713 - protein, 9 aa, Homo sapiens
QCVACAHYK

SEQ ID NO: 123714 - protein, 9 aa, Homo sapiens
CVACAHYKD

SEQ ID NO: 123715 - protein, 9 aa, Homo sapiens
VACAHYKDP

SEQ ID NO: 123716 - protein, 9 aa, Homo sapiens
ACAHYKDPP

SEQ ID NO: 123717 - protein, 9 aa, Homo sapiens
CAHYKDPPF

SEQ ID NO: 123718 - protein, 9 aa, Homo sapiens
AHYKDPPFC

SEQ ID NO: 123719 - protein, 9 aa, Homo sapiens
HYKDPPFCV

SEQ ID NO: 123720 - protein, 9 aa, Homo sapiens
YKDPPFCVA

SEQ ID NO: 123721 - protein, 9 aa, Homo sapiens
KDPPFCVAR

SEQ ID NO: 123722 - protein, 9 aa, Homo sapiens
DPPFCVARC

SEQ ID NO: 123723 - protein, 9 aa, Homo sapiens
PPFCVARCP

SEQ ID NO: 123724 - protein, 9 aa, Homo sapiens
PFCVARCPS

SEQ ID NO: 123725 - protein, 9 aa, Homo sapiens
FCVARCPSG

SEQ ID NO: 123726 - protein, 9 aa, Homo sapiens
CVARCPSGV

SEQ ID NO: 123727 - protein, 9 aa, Homo sapiens
VARCPSGVK

SEQ ID NO: 123728 - protein, 9 aa, Homo sapiens
ARCPSGVKP

SEQ ID NO: 123729 - protein, 9 aa, Homo sapiens
RCPSGVKPD

SEQ ID NO: 123730 - protein, 9 aa, Homo sapiens
CPSGVKPDL

SEQ ID NO: 123731 - protein, 9 aa, Homo sapiens
PSGVKPDLS

SEQ ID NO: 123732 - protein, 9 aa, Homo sapiens
SGVKPDLSY

SEQ ID NO: 123733 - protein, 9 aa, Homo sapiens
GVKPDLSYM

SEQ ID NO: 123734 - protein, 9 aa, Homo sapiens
VKPDLSYMP

SEQ ID NO: 123735 - protein, 9 aa, Homo sapiens
KPDLSYMPI

SEQ ID NO: 123736 - protein, 9 aa, Homo sapiens
PDLSYMPIW

SEQ ID NO: 123737 - protein, 9 aa, Homo sapiens
DLSYMPIWK

SEQ ID NO: 123738 - protein, 9 aa, Homo sapiens
LSYMPIWKF

SEQ ID NO: 123739 - protein, 9 aa, Homo sapiens
SYMPIWKFP

SEQ ID NO: 123740 - protein, 9 aa, Homo sapiens
YMPIWKFPD

SEQ ID NO: 123741 - protein, 9 aa, Homo sapiens
MPIWKFPDE

SEQ ID NO: 123742 - protein, 9 aa, Homo sapiens
PIWKFPDEE

SEQ ID NO: 123743 - protein, 9 aa, Homo sapiens
IWKFPDEEG

SEQ ID NO: 123744 - protein, 9 aa, Homo sapiens
WKFPDEEGA

SEQ ID NO: 123745 - protein, 9 aa, Homo sapiens
KFPDEEGAC

SEQ ID NO: 123746 - protein, 9 aa, Homo sapiens
FPDEEGACQ

SEQ ID NO: 123747 - protein, 9 aa, Homo sapiens
PDEEGACQP

SEQ ID NO: 123748 - protein, 9 aa, Homo sapiens
DEEGACQPC

SEQ ID NO: 123749 - protein, 9 aa, Homo sapiens
EEGACQPCP

SEQ ID NO: 123750 - protein, 9 aa, Homo sapiens
EGACQPCPI

SEQ ID NO: 123751 - protein, 9 aa, Homo sapiens
GACQPCPIN

SEQ ID NO: 123752 - protein, 9 aa, Homo sapiens
ACQPCPINC

SEQ ID NO: 123753 - protein, 9 aa, Homo sapiens
CQPCPINCT

SEQ ID NO: 123754 - protein, 9 aa, Homo sapiens
QPCPINCTH

SEQ ID NO: 123755 - protein, 9 aa, Homo sapiens
PCPINCTHS

SEQ ID NO: 123756 - protein, 9 aa, Homo sapiens
CPINCTHSC

SEQ ID NO: 123757 - protein, 9 aa, Homo sapiens
PINCTHSCV

SEQ ID NO: 123758 - protein, 9 aa, Homo sapiens
INCTHSCVD

SEQ ID NO: 123759 - protein, 9 aa, Homo sapiens
NCTHSCVDL

SEQ ID NO: 123760 - protein, 9 aa, Homo sapiens
CTHSCVDLD

SEQ ID NO: 123761 - protein, 9 aa, Homo sapiens
THSCVDLDD

SEQ ID NO: 123762 - protein, 9 aa, Homo sapiens
HSCVDLDDK

SEQ ID NO: 123763 - protein, 9 aa, Homo sapiens
SCVDLDDKG

SEQ ID NO: 123764 - protein, 9 aa, Homo sapiens
CVDLDDKGC

SEQ ID NO: 123765 - protein, 9 aa, Homo sapiens
VDLDDKGCP

SEQ ID NO: 123766 - protein, 9 aa, Homo sapiens
DLDDKGCPA

SEQ ID NO: 123767 - protein, 9 aa, Homo sapiens
LDDKGCPAE

SEQ ID NO: 123768 - protein, 9 aa, Homo sapiens
DDKGCPAEQ

SEQ ID NO: 123769 - protein, 9 aa, Homo sapiens
DKGCPAEQR

SEQ ID NO: 123770 - protein, 9 aa, Homo sapiens
KGCPAEQRA

SEQ ID NO: 123771 - protein, 9 aa, Homo sapiens
GCPAEQRAS

SEQ ID NO: 123772 - protein, 9 aa, Homo sapiens
CPAEQRASP

SEQ ID NO: 123773 - protein, 9 aa, Homo sapiens
PAEQRASPL

SEQ ID NO: 123774 - protein, 9 aa, Homo sapiens
AEQRASPLT

SEQ ID NO: 123775 - protein, 9 aa, Homo sapiens
EQRASPLTS

SEQ ID NO: 123776 - protein, 9 aa, Homo sapiens
QRASPLTSI

SEQ ID NO: 123777 - protein, 9 aa, Homo sapiens
RASPLTSII

SEQ ID NO: 123778 - protein, 9 aa, Homo sapiens
ASPLTSIIS

SEQ ID NO: 123779 - protein, 9 aa, Homo sapiens
SPLTSIISA

SEQ ID NO: 123780 - protein, 9 aa, Homo sapiens
PLTSIISAV

SEQ ID NO: 123781 - protein, 9 aa, Homo sapiens
LTSIISAVV

SEQ ID NO: 123782 - protein, 9 aa, Homo sapiens
TSIISAVVG

SEQ ID NO: 123783 - protein, 9 aa, Homo sapiens
SIISAVVGI

SEQ ID NO: 123784 - protein, 9 aa, Homo sapiens
IISAVVGIL

SEQ ID NO: 123785 - protein, 9 aa, Homo sapiens
ISAVVGILL

SEQ ID NO: 123786 - protein, 9 aa, Homo sapiens
SAVVGILLV

SEQ ID NO: 123787 - protein, 9 aa, Homo sapiens
AVVGILLVV

SEQ ID NO: 123788 - protein, 9 aa, Homo sapiens
VVGILLVVV

SEQ ID NO: 123789 - protein, 9 aa, Homo sapiens
VGILLVVVL

SEQ ID NO: 123790 - protein, 9 aa, Homo sapiens
GILLVVVLG

SEQ ID NO: 123791 - protein, 9 aa, Homo sapiens
ILLVVVLGV

SEQ ID NO: 123792 - protein, 9 aa, Homo sapiens
LLVVVLGVV

SEQ ID NO: 123793 - protein, 9 aa, Homo sapiens
LVVVLGVVF

SEQ ID NO: 123794 - protein, 9 aa, Homo sapiens
VVVLGVVFG

SEQ ID NO: 123795 - protein, 9 aa, Homo sapiens
VVLGVVFGI

SEQ ID NO: 123796 - protein, 9 aa, Homo sapiens
VLGVVFGIL

SEQ ID NO: 123797 - protein, 9 aa, Homo sapiens
LGVVFGILI

SEQ ID NO: 123798 - protein, 9 aa, Homo sapiens
GVVFGILIK

SEQ ID NO: 123799 - protein, 9 aa, Homo sapiens
VVFGILIKR

SEQ ID NO: 123800 - protein, 9 aa, Homo sapiens
VFGILIKRR

SEQ ID NO: 123801 - protein, 9 aa, Homo sapiens
FGILIKRRQ

SEQ ID NO: 123802 - protein, 9 aa, Homo sapiens
GILIKRRQQ

SEQ ID NO: 123803 - protein, 9 aa, Homo sapiens
ILIKRRQQK

SEQ ID NO: 123804 - protein, 9 aa, Homo sapiens
LIKRRQQKI

SEQ ID NO: 123805 - protein, 9 aa, Homo sapiens
IKRRQQKIR

SEQ ID NO: 123806 - protein, 9 aa, Homo sapiens
KRRQQKIRK

SEQ ID NO: 123807 - protein, 9 aa, Homo sapiens
RRQQKIRKY

SEQ ID NO: 123808 - protein, 9 aa, Homo sapiens
RQQKIRKYT

SEQ ID NO: 123809 - protein, 9 aa, Homo sapiens
QQKIRKYTM

SEQ ID NO: 123810 - protein, 9 aa, Homo sapiens
QKIRKYTMR

SEQ ID NO: 123811 - protein, 9 aa, Homo sapiens
KIRKYTMRR

SEQ ID NO: 123812 - protein, 9 aa, Homo sapiens
IRKYTMRRL

SEQ ID NO: 123813 - protein, 9 aa, Homo sapiens
RKYTMRRLL

SEQ ID NO: 123814 - protein, 9 aa, Homo sapiens
KYTMRRLLQ

SEQ ID NO: 123815 - protein, 9 aa, Homo sapiens
YTMRRLLQE

SEQ ID NO: 123816 - protein, 9 aa, Homo sapiens
TMRRLLQET

SEQ ID NO: 123817 - protein, 9 aa, Homo sapiens
MRRLLQETE

SEQ ID NO: 123818 - protein, 9 aa, Homo sapiens
RRLLQETEL

SEQ ID NO: 123819 - protein, 9 aa, Homo sapiens
RLLQETELV

SEQ ID NO: 123820 - protein, 9 aa, Homo sapiens
LLQETELVE

SEQ ID NO: 123821 - protein, 9 aa, Homo sapiens
LQETELVEP

SEQ ID NO: 123822 - protein, 9 aa, Homo sapiens
QETELVEPL

SEQ ID NO: 123823 - protein, 9 aa, Homo sapiens
ETELVEPLT

SEQ ID NO: 123824 - protein, 9 aa, Homo sapiens
TELVEPLTP

SEQ ID NO: 123825 - protein, 9 aa, Homo sapiens
ELVEPLTPS

SEQ ID NO: 123826 - protein, 9 aa, Homo sapiens
LVEPLTPSG

SEQ ID NO: 123827 - protein, 9 aa, Homo sapiens
VEPLTPSGA

SEQ ID NO: 123828 - protein, 9 aa, Homo sapiens
EPLTPSGAM

SEQ ID NO: 123829 - protein, 9 aa, Homo sapiens
PLTPSGAMP

SEQ ID NO: 123830 - protein, 9 aa, Homo sapiens
LTPSGAMPN

SEQ ID NO: 123831 - protein, 9 aa, Homo sapiens
TPSGAMPNQ

SEQ ID NO: 123832 - protein, 9 aa, Homo sapiens
PSGAMPNQA

SEQ ID NO: 123833 - protein, 9 aa, Homo sapiens
SGAMPNQAQ

SEQ ID NO: 123834 - protein, 9 aa, Homo sapiens
GAMPNQAQM

SEQ ID NO: 123835 - protein, 9 aa, Homo sapiens
AMPNQAQMR

SEQ ID NO: 123836 - protein, 9 aa, Homo sapiens
MPNQAQMRI

SEQ ID NO: 123837 - protein, 9 aa, Homo sapiens
PNQAQMRIL

SEQ ID NO: 123838 - protein, 9 aa, Homo sapiens
NQAQMRILK

SEQ ID NO: 123839 - protein, 9 aa, Homo sapiens
QAQMRILKE

SEQ ID NO: 123840 - protein, 9 aa, Homo sapiens
AQMRILKET

SEQ ID NO: 123841 - protein, 9 aa, Homo sapiens
QMRILKETE

SEQ ID NO: 123842 - protein, 9 aa, Homo sapiens
MRILKETEL

SEQ ID NO: 123843 - protein, 9 aa, Homo sapiens
RILKETELR

SEQ ID NO: 123844 - protein, 9 aa, Homo sapiens
ILKETELRK

SEQ ID NO: 123845 - protein, 9 aa, Homo sapiens
LKETELRKV

SEQ ID NO: 123846 - protein, 9 aa, Homo sapiens
KETELRKVK

SEQ ID NO: 123847 - protein, 9 aa, Homo sapiens
ETELRKVKV

SEQ ID NO: 123848 - protein, 9 aa, Homo sapiens
TELRKVKVL

SEQ ID NO: 123849 - protein, 9 aa, Homo sapiens
ELRKVKVLG

SEQ ID NO: 123850 - protein, 9 aa, Homo sapiens
LRKVKVLGS

SEQ ID NO: 123851 - protein, 9 aa, Homo sapiens
RKVKVLGSG

SEQ ID NO: 123852 - protein, 9 aa, Homo sapiens
KVKVLGSGA

SEQ ID NO: 123853 - protein, 9 aa, Homo sapiens
VKVLGSGAF

SEQ ID NO: 123854 - protein, 9 aa, Homo sapiens
KVLGSGAFG

SEQ ID NO: 123855 - protein, 9 aa, Homo sapiens
VLGSGAFGT

SEQ ID NO: 123856 - protein, 9 aa, Homo sapiens
LGSGAFGTV

SEQ ID NO: 123857 - protein, 9 aa, Homo sapiens
GSGAFGTVY

SEQ ID NO: 123858 - protein, 9 aa, Homo sapiens
SGAFGTVYK

SEQ ID NO: 123859 - protein, 9 aa, Homo sapiens
GAFGTVYKG

SEQ ID NO: 123860 - protein, 9 aa, Homo sapiens
AFGTVYKGI

SEQ ID NO: 123861 - protein, 9 aa, Homo sapiens
FGTVYKGIW

SEQ ID NO: 123862 - protein, 9 aa, Homo sapiens
GTVYKGIWI

SEQ ID NO: 123863 - protein, 9 aa, Homo sapiens
TVYKGIWIP

SEQ ID NO: 123864 - protein, 9 aa, Homo sapiens
VYKGIWIPD

SEQ ID NO: 123865 - protein, 9 aa, Homo sapiens
YKGIWIPDG

SEQ ID NO: 123866 - protein, 9 aa, Homo sapiens
KGIWIPDGE

SEQ ID NO: 123867 - protein, 9 aa, Homo sapiens
GIWIPDGEN

SEQ ID NO: 123868 - protein, 9 aa, Homo sapiens
IWIPDGENV

SEQ ID NO: 123869 - protein, 9 aa, Homo sapiens
WIPDGENVK

SEQ ID NO: 123870 - protein, 9 aa, Homo sapiens
IPDGENVKI

SEQ ID NO: 123871 - protein, 9 aa, Homo sapiens
PDGENVKIP

SEQ ID NO: 123872 - protein, 9 aa, Homo sapiens
DGENVKIPV

SEQ ID NO: 123873 - protein, 9 aa, Homo sapiens
GENVKIPVA

SEQ ID NO: 123874 - protein, 9 aa, Homo sapiens
ENVKIPVAI

SEQ ID NO: 123875 - protein, 9 aa, Homo sapiens
NVKIPVAIK

SEQ ID NO: 123876 - protein, 9 aa, Homo sapiens
VKIPVAIKV

SEQ ID NO: 123877 - protein, 9 aa, Homo sapiens
KIPVAIKVL

SEQ ID NO: 123878 - protein, 9 aa, Homo sapiens
IPVAIKVLR

SEQ ID NO: 123879 - protein, 9 aa, Homo sapiens
PVAIKVLRE

SEQ ID NO: 123880 - protein, 9 aa, Homo sapiens
VAIKVLREN

SEQ ID NO: 123881 - protein, 9 aa, Homo sapiens
AIKVLRENT

SEQ ID NO: 123882 - protein, 9 aa, Homo sapiens
IKVLRENTS

SEQ ID NO: 123883 - protein, 9 aa, Homo sapiens
KVLRENTSP

SEQ ID NO: 123884 - protein, 9 aa, Homo sapiens
VLRENTSPK

SEQ ID NO: 123885 - protein, 9 aa, Homo sapiens
LRENTSPKA

SEQ ID NO: 123886 - protein, 9 aa, Homo sapiens
RENTSPKAN

SEQ ID NO: 123887 - protein, 9 aa, Homo sapiens
ENTSPKANK

SEQ ID NO: 123888 - protein, 9 aa, Homo sapiens
NTSPKANKE

SEQ ID NO: 123889 - protein, 9 aa, Homo sapiens
TSPKANKEI

SEQ ID NO: 123890 - protein, 9 aa, Homo sapiens
SPKANKEIL

SEQ ID NO: 123891 - protein, 9 aa, Homo sapiens
PKANKEILD

SEQ ID NO: 123892 - protein, 9 aa, Homo sapiens
KANKEILDE

SEQ ID NO: 123893 - protein, 9 aa, Homo sapiens
ANKEILDEA

SEQ ID NO: 123894 - protein, 9 aa, Homo sapiens
NKEILDEAY

SEQ ID NO: 123895 - protein, 9 aa, Homo sapiens
KEILDEAYV

SEQ ID NO: 123896 - protein, 9 aa, Homo sapiens
EILDEAYVM

SEQ ID NO: 123897 - protein, 9 aa, Homo sapiens
ILDEAYVMA

SEQ ID NO: 123898 - protein, 9 aa, Homo sapiens
LDEAYVMAG

SEQ ID NO: 123899 - protein, 9 aa, Homo sapiens
DEAYVMAGV

SEQ ID NO: 123900 - protein, 9 aa, Homo sapiens
EAYVMAGVG

SEQ ID NO: 123901 - protein, 9 aa, Homo sapiens
AYVMAGVGS

SEQ ID NO: 123902 - protein, 9 aa, Homo sapiens
YVMAGVGSP

SEQ ID NO: 123903 - protein, 9 aa, Homo sapiens
VMAGVGSPY

SEQ ID NO: 123904 - protein, 9 aa, Homo sapiens
MAGVGSPYV

SEQ ID NO: 123905 - protein, 9 aa, Homo sapiens
AGVGSPYVS

SEQ ID NO: 123906 - protein, 9 aa, Homo sapiens
GVGSPYVSR

SEQ ID NO: 123907 - protein, 9 aa, Homo sapiens
VGSPYVSRL

SEQ ID NO: 123908 - protein, 9 aa, Homo sapiens
GSPYVSRLL

SEQ ID NO: 123909 - protein, 9 aa, Homo sapiens
SPYVSRLLG

SEQ ID NO: 123910 - protein, 9 aa, Homo sapiens
PYVSRLLGI

SEQ ID NO: 123911 - protein, 9 aa, Homo sapiens
YVSRLLGIC

SEQ ID NO: 123912 - protein, 9 aa, Homo sapiens
VSRLLGICL

SEQ ID NO: 123913 - protein, 9 aa, Homo sapiens
SRLLGICLT

SEQ ID NO: 123914 - protein, 9 aa, Homo sapiens
RLLGICLTS

SEQ ID NO: 123915 - protein, 9 aa, Homo sapiens
LLGICLTST

SEQ ID NO: 123916 - protein, 9 aa, Homo sapiens
LGICLTSTV

SEQ ID NO: 123917 - protein, 9 aa, Homo sapiens
GICLTSTVQ

SEQ ID NO: 123918 - protein, 9 aa, Homo sapiens
ICLTSTVQL

SEQ ID NO: 123919 - protein, 9 aa, Homo sapiens
CLTSTVQLV

SEQ ID NO: 123920 - protein, 9 aa, Homo sapiens
LTSTVQLVT

SEQ ID NO: 123921 - protein, 9 aa, Homo sapiens
TSTVQLVTQ

SEQ ID NO: 123922 - protein, 9 aa, Homo sapiens
STVQLVTQL

SEQ ID NO: 123923 - protein, 9 aa, Homo sapiens
TVQLVTQLM

SEQ ID NO: 123924 - protein, 9 aa, Homo sapiens
VQLVTQLMP

SEQ ID NO: 123925 - protein, 9 aa, Homo sapiens
QLVTQLMPY

SEQ ID NO: 123926 - protein, 9 aa, Homo sapiens
LVTQLMPYG

SEQ ID NO: 123927 - protein, 9 aa, Homo sapiens
VTQLMPYGC

SEQ ID NO: 123928 - protein, 9 aa, Homo sapiens
TQLMPYGCL

SEQ ID NO: 123929 - protein, 9 aa, Homo sapiens
QLMPYGCLL

SEQ ID NO: 123930 - protein, 9 aa, Homo sapiens
LMPYGCLLD

SEQ ID NO: 123931 - protein, 9 aa, Homo sapiens
MPYGCLLDH

SEQ ID NO: 123932 - protein, 9 aa, Homo sapiens
PYGCLLDHV

SEQ ID NO: 123933 - protein, 9 aa, Homo sapiens
YGCLLDHVR

SEQ ID NO: 123934 - protein, 9 aa, Homo sapiens
GCLLDHVRE

SEQ ID NO: 123935 - protein, 9 aa, Homo sapiens
CLLDHVREN

SEQ ID NO: 123936 - protein, 9 aa, Homo sapiens
LLDHVRENR

SEQ ID NO: 123937 - protein, 9 aa, Homo sapiens
LDHVRENRG

SEQ ID NO: 123938 - protein, 9 aa, Homo sapiens
DHVRENRGR

SEQ ID NO: 123939 - protein, 9 aa, Homo sapiens
HVRENRGRL

SEQ ID NO: 123940 - protein, 9 aa, Homo sapiens
VRENRGRLG

SEQ ID NO: 123941 - protein, 9 aa, Homo sapiens
RENRGRLGS

SEQ ID NO: 123942 - protein, 9 aa, Homo sapiens
ENRGRLGSQ

SEQ ID NO: 123943 - protein, 9 aa, Homo sapiens
NRGRLGSQD

SEQ ID NO: 123944 - protein, 9 aa, Homo sapiens
RGRLGSQDL

SEQ ID NO: 123945 - protein, 9 aa, Homo sapiens
GRLGSQDLL

SEQ ID NO: 123946 - protein, 9 aa, Homo sapiens
RLGSQDLLN

SEQ ID NO: 123947 - protein, 9 aa, Homo sapiens
LGSQDLLNW

SEQ ID NO: 123948 - protein, 9 aa, Homo sapiens
GSQDLLNWC

SEQ ID NO: 123949 - protein, 9 aa, Homo sapiens
SQDLLNWCM

SEQ ID NO: 123950 - protein, 9 aa, Homo sapiens
QDLLNWCMQ

SEQ ID NO: 123951 - protein, 9 aa, Homo sapiens
DLLNWCMQI

SEQ ID NO: 123952 - protein, 9 aa, Homo sapiens
LLNWCMQIA

SEQ ID NO: 123953 - protein, 9 aa, Homo sapiens
LNWCMQIAK

SEQ ID NO: 123954 - protein, 9 aa, Homo sapiens
NWCMQIAKG

SEQ ID NO: 123955 - protein, 9 aa, Homo sapiens
WCMQIAKGM

SEQ ID NO: 123956 - protein, 9 aa, Homo sapiens
CMQIAKGMS

SEQ ID NO: 123957 - protein, 9 aa, Homo sapiens
MQIAKGMSY

SEQ ID NO: 123958 - protein, 9 aa, Homo sapiens
QIAKGMSYL

SEQ ID NO: 123959 - protein, 9 aa, Homo sapiens
IAKGMSYLE

SEQ ID NO: 123960 - protein, 9 aa, Homo sapiens
AKGMSYLED

SEQ ID NO: 123961 - protein, 9 aa, Homo sapiens
KGMSYLEDV

SEQ ID NO: 123962 - protein, 9 aa, Homo sapiens
GMSYLEDVR

SEQ ID NO: 123963 - protein, 9 aa, Homo sapiens
MSYLEDVRL

SEQ ID NO: 123964 - protein, 9 aa, Homo sapiens
SYLEDVRLV

SEQ ID NO: 123965 - protein, 9 aa, Homo sapiens
YLEDVRLVH

SEQ ID NO: 123966 - protein, 9 aa, Homo sapiens
LEDVRLVHR

SEQ ID NO: 123967 - protein, 9 aa, Homo sapiens
EDVRLVHRD

SEQ ID NO: 123968 - protein, 9 aa, Homo sapiens
DVRLVHRDL

SEQ ID NO: 123969 - protein, 9 aa, Homo sapiens
VRLVHRDLA

SEQ ID NO: 123970 - protein, 9 aa, Homo sapiens
RLVHRDLAA

SEQ ID NO: 123971 - protein, 9 aa, Homo sapiens
LVHRDLAAR

SEQ ID NO: 123972 - protein, 9 aa, Homo sapiens
VHRDLAARN

SEQ ID NO: 123973 - protein, 9 aa, Homo sapiens
HRDLAARNV

SEQ ID NO: 123974 - protein, 9 aa, Homo sapiens
RDLAARNVL

SEQ ID NO: 123975 - protein, 9 aa, Homo sapiens
DLAARNVLV

SEQ ID NO: 123976 - protein, 9 aa, Homo sapiens
LAARNVLVK

SEQ ID NO: 123977 - protein, 9 aa, Homo sapiens
AARNVLVKS

SEQ ID NO: 123978 - protein, 9 aa, Homo sapiens
ARNVLVKSP

SEQ ID NO: 123979 - protein, 9 aa, Homo sapiens
RNVLVKSPN

SEQ ID NO: 123980 - protein, 9 aa, Homo sapiens
NVLVKSPNH

SEQ ID NO: 123981 - protein, 9 aa, Homo sapiens
VLVKSPNHV

SEQ ID NO: 123982 - protein, 9 aa, Homo sapiens
LVKSPNHVK

SEQ ID NO: 123983 - protein, 9 aa, Homo sapiens
VKSPNHVKI

SEQ ID NO: 123984 - protein, 9 aa, Homo sapiens
KSPNHVKIT

SEQ ID NO: 123985 - protein, 9 aa, Homo sapiens
SPNHVKITD

SEQ ID NO: 123986 - protein, 9 aa, Homo sapiens
PNHVKITDF

SEQ ID NO: 123987 - protein, 9 aa, Homo sapiens
NHVKITDFG

SEQ ID NO: 123988 - protein, 9 aa, Homo sapiens
HVKITDFGL

SEQ ID NO: 123989 - protein, 9 aa, Homo sapiens
VKITDFGLA

SEQ ID NO: 123990 - protein, 9 aa, Homo sapiens
KITDFGLAR

SEQ ID NO: 123991 - protein, 9 aa, Homo sapiens
ITDFGLARL

SEQ ID NO: 123992 - protein, 9 aa, Homo sapiens
TDFGLARLL

SEQ ID NO: 123993 - protein, 9 aa, Homo sapiens
DFGLARLLD

SEQ ID NO: 123994 - protein, 9 aa, Homo sapiens
FGLARLLDI

SEQ ID NO: 123995 - protein, 9 aa, Homo sapiens
GLARLLDID

SEQ ID NO: 123996 - protein, 9 aa, Homo sapiens
LARLLDIDE

SEQ ID NO: 123997 - protein, 9 aa, Homo sapiens
ARLLDIDET

SEQ ID NO: 123998 - protein, 9 aa, Homo sapiens
RLLDIDETE

SEQ ID NO: 123999 - protein, 9 aa, Homo sapiens
LLDIDETEY

SEQ ID NO: 124000 - protein, 9 aa, Homo sapiens
LDIDETEYH

SEQ ID NO: 124001 - protein, 9 aa, Homo sapiens
DIDETEYHA

SEQ ID NO: 124002 - protein, 9 aa, Homo sapiens
IDETEYHAD

SEQ ID NO: 124003 - protein, 9 aa, Homo sapiens
DETEYHADG

SEQ ID NO: 124004 - protein, 9 aa, Homo sapiens
ETEYHADGG

SEQ ID NO: 124005 - protein, 9 aa, Homo sapiens
TEYHADGGK

SEQ ID NO: 124006 - protein, 9 aa, Homo sapiens
EYHADGGKV

SEQ ID NO: 124007 - protein, 9 aa, Homo sapiens
YHADGGKVP

SEQ ID NO: 124008 - protein, 9 aa, Homo sapiens
HADGGKVPI

SEQ ID NO: 124009 - protein, 9 aa, Homo sapiens
ADGGKVPIK

SEQ ID NO: 124010 - protein, 9 aa, Homo sapiens
DGGKVPIKW

SEQ ID NO: 124011 - protein, 9 aa, Homo sapiens
GGKVPIKWM

SEQ ID NO: 124012 - protein, 9 aa, Homo sapiens
GKVPIKWMA

SEQ ID NO: 124013 - protein, 9 aa, Homo sapiens
KVPIKWMAL

SEQ ID NO: 124014 - protein, 9 aa, Homo sapiens
VPIKWMALE

SEQ ID NO: 124015 - protein, 9 aa, Homo sapiens
PIKWMALES

SEQ ID NO: 124016 - protein, 9 aa, Homo sapiens
IKWMALESI

SEQ ID NO: 124017 - protein, 9 aa, Homo sapiens
KWMALESIL

SEQ ID NO: 124018 - protein, 9 aa, Homo sapiens
WMALESILR

SEQ ID NO: 124019 - protein, 9 aa, Homo sapiens
MALESILRR

SEQ ID NO: 124020 - protein, 9 aa, Homo sapiens
ALESILRRR

SEQ ID NO: 124021 - protein, 9 aa, Homo sapiens
LESILRRRF

SEQ ID NO: 124022 - protein, 9 aa, Homo sapiens
ESILRRRFT

SEQ ID NO: 124023 - protein, 9 aa, Homo sapiens
SILRRRFTH

SEQ ID NO: 124024 - protein, 9 aa, Homo sapiens
ILRRRFTHQ

SEQ ID NO: 124025 - protein, 9 aa, Homo sapiens
LRRRFTHQS

SEQ ID NO: 124026 - protein, 9 aa, Homo sapiens
RRRFTHQSD

SEQ ID NO: 124027 - protein, 9 aa, Homo sapiens
RRFTHQSDV

SEQ ID NO: 124028 - protein, 9 aa, Homo sapiens
RFTHQSDVW

SEQ ID NO: 124029 - protein, 9 aa, Homo sapiens
FTHQSDVWS

SEQ ID NO: 124030 - protein, 9 aa, Homo sapiens
THQSDVWSY

SEQ ID NO: 124031 - protein, 9 aa, Homo sapiens
HQSDVWSYG

SEQ ID NO: 124032 - protein, 9 aa, Homo sapiens
QSDVWSYGV

SEQ ID NO: 124033 - protein, 9 aa, Homo sapiens
SDVWSYGVT

SEQ ID NO: 124034 - protein, 9 aa, Homo sapiens
DVWSYGVTV

SEQ ID NO: 124035 - protein, 9 aa, Homo sapiens
VWSYGVTVW

SEQ ID NO: 124036 - protein, 9 aa, Homo sapiens
WSYGVTVWE

SEQ ID NO: 124037 - protein, 9 aa, Homo sapiens
SYGVTVWEL

SEQ ID NO: 124038 - protein, 9 aa, Homo sapiens
YGVTVWELM

SEQ ID NO: 124039 - protein, 9 aa, Homo sapiens
GVTVWELMT

SEQ ID NO: 124040 - protein, 9 aa, Homo sapiens
VTVWELMTF

SEQ ID NO: 124041 - protein, 9 aa, Homo sapiens
TVWELMTFG

SEQ ID NO: 124042 - protein, 9 aa, Homo sapiens
VWELMTFGA

SEQ ID NO: 124043 - protein, 9 aa, Homo sapiens
WELMTFGAK

SEQ ID NO: 124044 - protein, 9 aa, Homo sapiens
ELMTFGAKP

SEQ ID NO: 124045 - protein, 9 aa, Homo sapiens
LMTFGAKPY

SEQ ID NO: 124046 - protein, 9 aa, Homo sapiens
MTFGAKPYD

SEQ ID NO: 124047 - protein, 9 aa, Homo sapiens
TFGAKPYDG

SEQ ID NO: 124048 - protein, 9 aa, Homo sapiens
FGAKPYDGI

SEQ ID NO: 124049 - protein, 9 aa, Homo sapiens
GAKPYDGIP

SEQ ID NO: 124050 - protein, 9 aa, Homo sapiens
AKPYDGIPA

SEQ ID NO: 124051 - protein, 9 aa, Homo sapiens
KPYDGIPAR

SEQ ID NO: 124052 - protein, 9 aa, Homo sapiens
PYDGIPARE

SEQ ID NO: 124053 - protein, 9 aa, Homo sapiens
YDGIPAREI

SEQ ID NO: 124054 - protein, 9 aa, Homo sapiens
DGIPAREIP

SEQ ID NO: 124055 - protein, 9 aa, Homo sapiens
GIPAREIPD

SEQ ID NO: 124056 - protein, 9 aa, Homo sapiens
IPAREIPDL

SEQ ID NO: 124057 - protein, 9 aa, Homo sapiens
PAREIPDLL

SEQ ID NO: 124058 - protein, 9 aa, Homo sapiens
AREIPDLLE

SEQ ID NO: 124059 - protein, 9 aa, Homo sapiens
REIPDLLEK

SEQ ID NO: 124060 - protein, 9 aa, Homo sapiens
EIPDLLEKG

SEQ ID NO: 124061 - protein, 9 aa, Homo sapiens
IPDLLEKGE

SEQ ID NO: 124062 - protein, 9 aa, Homo sapiens
PDLLEKGER

SEQ ID NO: 124063 - protein, 9 aa, Homo sapiens
DLLEKGERL

SEQ ID NO: 124064 - protein, 9 aa, Homo sapiens
LLEKGERLP

SEQ ID NO: 124065 - protein, 9 aa, Homo sapiens
LEKGERLPQ

SEQ ID NO: 124066 - protein, 9 aa, Homo sapiens
EKGERLPQP

SEQ ID NO: 124067 - protein, 9 aa, Homo sapiens
KGERLPQPP

SEQ ID NO: 124068 - protein, 9 aa, Homo sapiens
GERLPQPPI

SEQ ID NO: 124069 - protein, 9 aa, Homo sapiens
ERLPQPPIC

SEQ ID NO: 124070 - protein, 9 aa, Homo sapiens
RLPQPPICT

SEQ ID NO: 124071 - protein, 9 aa, Homo sapiens
LPQPPICTI

SEQ ID NO: 124072 - protein, 9 aa, Homo sapiens
PQPPICTID

SEQ ID NO: 124073 - protein, 9 aa, Homo sapiens
QPPICTIDV

SEQ ID NO: 124074 - protein, 9 aa, Homo sapiens
PPICTIDVY

SEQ ID NO: 124075 - protein, 9 aa, Homo sapiens
PICTIDVYM

SEQ ID NO: 124076 - protein, 9 aa, Homo sapiens
ICTIDVYMI

SEQ ID NO: 124077 - protein, 9 aa, Homo sapiens
CTIDVYMIM

SEQ ID NO: 124078 - protein, 9 aa, Homo sapiens
TIDVYMIMV

SEQ ID NO: 124079 - protein, 9 aa, Homo sapiens
IDVYMIMVK

SEQ ID NO: 124080 - protein, 9 aa, Homo sapiens
DVYMIMVKC

SEQ ID NO: 124081 - protein, 9 aa, Homo sapiens
VYMIMVKCW

SEQ ID NO: 124082 - protein, 9 aa, Homo sapiens
YMIMVKCWM

SEQ ID NO: 124083 - protein, 9 aa, Homo sapiens
MIMVKCWMI

SEQ ID NO: 124084 - protein, 9 aa, Homo sapiens
IMVKCWMID

SEQ ID NO: 124085 - protein, 9 aa, Homo sapiens
MVKCWMIDS

SEQ ID NO: 124086 - protein, 9 aa, Homo sapiens
VKCWMIDSE

SEQ ID NO: 124087 - protein, 9 aa, Homo sapiens
KCWMIDSEC

SEQ ID NO: 124088 - protein, 9 aa, Homo sapiens
CWMIDSECR

SEQ ID NO: 124089 - protein, 9 aa, Homo sapiens
WMIDSECRP

SEQ ID NO: 124090 - protein, 9 aa, Homo sapiens
MIDSECRPR

SEQ ID NO: 124091 - protein, 9 aa, Homo sapiens
IDSECRPRF

SEQ ID NO: 124092 - protein, 9 aa, Homo sapiens
DSECRPRFR

SEQ ID NO: 124093 - protein, 9 aa, Homo sapiens
SECRPRFRE

SEQ ID NO: 124094 - protein, 9 aa, Homo sapiens
ECRPRFREL

SEQ ID NO: 124095 - protein, 9 aa, Homo sapiens
CRPRFRELV

SEQ ID NO: 124096 - protein, 9 aa, Homo sapiens
RPRFRELVS

SEQ ID NO: 124097 - protein, 9 aa, Homo sapiens
PRFRELVSE

SEQ ID NO: 124098 - protein, 9 aa, Homo sapiens
RFRELVSEF

SEQ ID NO: 124099 - protein, 9 aa, Homo sapiens
FRELVSEFS

SEQ ID NO: 124100 - protein, 9 aa, Homo sapiens
RELVSEFSR

SEQ ID NO: 124101 - protein, 9 aa, Homo sapiens
ELVSEFSRM

SEQ ID NO: 124102 - protein, 9 aa, Homo sapiens
LVSEFSRMA

SEQ ID NO: 124103 - protein, 9 aa, Homo sapiens
VSEFSRMAR

SEQ ID NO: 124104 - protein, 9 aa, Homo sapiens
SEFSRMARD

SEQ ID NO: 124105 - protein, 9 aa, Homo sapiens
EFSRMARDP

SEQ ID NO: 124106 - protein, 9 aa, Homo sapiens
FSRMARDPQ

SEQ ID NO: 124107 - protein, 9 aa, Homo sapiens
SRMARDPQR

SEQ ID NO: 124108 - protein, 9 aa, Homo sapiens
RMARDPQRF

SEQ ID NO: 124109 - protein, 9 aa, Homo sapiens
MARDPQRFV

SEQ ID NO: 124110 - protein, 9 aa, Homo sapiens
ARDPQRFVV

SEQ ID NO: 124111 - protein, 9 aa, Homo sapiens
RDPQRFVVI

SEQ ID NO: 124112 - protein, 9 aa, Homo sapiens
DPQRFVVIQ

SEQ ID NO: 124113 - protein, 9 aa, Homo sapiens
PQRFVVIQN

SEQ ID NO: 124114 - protein, 9 aa, Homo sapiens
QRFVVIQNE

SEQ ID NO: 124115 - protein, 9 aa, Homo sapiens
RFVVIQNED

SEQ ID NO: 124116 - protein, 9 aa, Homo sapiens
FVVIQNEDL

SEQ ID NO: 124117 - protein, 9 aa, Homo sapiens
VVIQNEDLG

SEQ ID NO: 124118 - protein, 9 aa, Homo sapiens
VIQNEDLGP

SEQ ID NO: 124119 - protein, 9 aa, Homo sapiens
IQNEDLGPA

SEQ ID NO: 124120 - protein, 9 aa, Homo sapiens
QNEDLGPAS

SEQ ID NO: 124121 - protein, 9 aa, Homo sapiens
NEDLGPASP

SEQ ID NO: 124122 - protein, 9 aa, Homo sapiens
EDLGPASPL

SEQ ID NO: 124123 - protein, 9 aa, Homo sapiens
DLGPASPLD

SEQ ID NO: 124124 - protein, 9 aa, Homo sapiens
LGPASPLDS

SEQ ID NO: 124125 - protein, 9 aa, Homo sapiens
GPASPLDST

SEQ ID NO: 124126 - protein, 9 aa, Homo sapiens
PASPLDSTF

SEQ ID NO: 124127 - protein, 9 aa, Homo sapiens
ASPLDSTFY

SEQ ID NO: 124128 - protein, 9 aa, Homo sapiens
SPLDSTFYR

SEQ ID NO: 124129 - protein, 9 aa, Homo sapiens
PLDSTFYRS

SEQ ID NO: 124130 - protein, 9 aa, Homo sapiens
LDSTFYRSL

SEQ ID NO: 124131 - protein, 9 aa, Homo sapiens
DSTFYRSLL

SEQ ID NO: 124132 - protein, 9 aa, Homo sapiens
STFYRSLLE

SEQ ID NO: 124133 - protein, 9 aa, Homo sapiens
TFYRSLLED

SEQ ID NO: 124134 - protein, 9 aa, Homo sapiens
FYRSLLEDD

SEQ ID NO: 124135 - protein, 9 aa, Homo sapiens
YRSLLEDDD

SEQ ID NO: 124136 - protein, 9 aa, Homo sapiens
RSLLEDDDM

SEQ ID NO: 124137 - protein, 9 aa, Homo sapiens
SLLEDDDMG

SEQ ID NO: 124138 - protein, 9 aa, Homo sapiens
LLEDDDMGD

SEQ ID NO: 124139 - protein, 9 aa, Homo sapiens
LEDDDMGDL

SEQ ID NO: 124140 - protein, 9 aa, Homo sapiens
EDDDMGDLV

SEQ ID NO: 124141 - protein, 9 aa, Homo sapiens
DDDMGDLVD

SEQ ID NO: 124142 - protein, 9 aa, Homo sapiens
DDMGDLVDA

SEQ ID NO: 124143 - protein, 9 aa, Homo sapiens
DMGDLVDAE

SEQ ID NO: 124144 - protein, 9 aa, Homo sapiens
MGDLVDAEE

SEQ ID NO: 124145 - protein, 9 aa, Homo sapiens
GDLVDAEEY

SEQ ID NO: 124146 - protein, 9 aa, Homo sapiens
DLVDAEEYL

SEQ ID NO: 124147 - protein, 9 aa, Homo sapiens
LVDAEEYLV

SEQ ID NO: 124148 - protein, 9 aa, Homo sapiens
VDAEEYLVP

SEQ ID NO: 124149 - protein, 9 aa, Homo sapiens
DAEEYLVPQ

SEQ ID NO: 124150 - protein, 9 aa, Homo sapiens
AEEYLVPQQ

SEQ ID NO: 124151 - protein, 9 aa, Homo sapiens
EEYLVPQQG

SEQ ID NO: 124152 - protein, 9 aa, Homo sapiens
EYLVPQQGF

SEQ ID NO: 124153 - protein, 9 aa, Homo sapiens
YLVPQQGFF

SEQ ID NO: 124154 - protein, 9 aa, Homo sapiens
LVPQQGFFC

SEQ ID NO: 124155 - protein, 9 aa, Homo sapiens
VPQQGFFCP

SEQ ID NO: 124156 - protein, 9 aa, Homo sapiens
PQQGFFCPD

SEQ ID NO: 124157 - protein, 9 aa, Homo sapiens
QQGFFCPDP

SEQ ID NO: 124158 - protein, 9 aa, Homo sapiens
QGFFCPDPA

SEQ ID NO: 124159 - protein, 9 aa, Homo sapiens
GFFCPDPAP

SEQ ID NO: 124160 - protein, 9 aa, Homo sapiens
FFCPDPAPG

SEQ ID NO: 124161 - protein, 9 aa, Homo sapiens
FCPDPAPGA

SEQ ID NO: 124162 - protein, 9 aa, Homo sapiens
CPDPAPGAG

SEQ ID NO: 124163 - protein, 9 aa, Homo sapiens
PDPAPGAGG

SEQ ID NO: 124164 - protein, 9 aa, Homo sapiens
DPAPGAGGM

SEQ ID NO: 124165 - protein, 9 aa, Homo sapiens
PAPGAGGMV

SEQ ID NO: 124166 - protein, 9 aa, Homo sapiens
APGAGGMVH

SEQ ID NO: 124167 - protein, 9 aa, Homo sapiens
PGAGGMVHH

SEQ ID NO: 124168 - protein, 9 aa, Homo sapiens
GAGGMVHHR

SEQ ID NO: 124169 - protein, 9 aa, Homo sapiens
AGGMVHHRH

SEQ ID NO: 124170 - protein, 9 aa, Homo sapiens
GGMVHHRHR

SEQ ID NO: 124171 - protein, 9 aa, Homo sapiens
GMVHHRHRS

SEQ ID NO: 124172 - protein, 9 aa, Homo sapiens
MVHHRHRSS

SEQ ID NO: 124173 - protein, 9 aa, Homo sapiens
VHHRHRSSS

SEQ ID NO: 124174 - protein, 9 aa, Homo sapiens
HHRHRSSST

SEQ ID NO: 124175 - protein, 9 aa, Homo sapiens
HRHRSSSTR

SEQ ID NO: 124176 - protein, 9 aa, Homo sapiens
RHRSSSTRS

SEQ ID NO: 124177 - protein, 9 aa, Homo sapiens
HRSSSTRSG

SEQ ID NO: 124178 - protein, 9 aa, Homo sapiens
RSSSTRSGG

SEQ ID NO: 124179 - protein, 9 aa, Homo sapiens
SSSTRSGGG

SEQ ID NO: 124180 - protein, 9 aa, Homo sapiens
SSTRSGGGD

SEQ ID NO: 124181 - protein, 9 aa, Homo sapiens
STRSGGGDL

SEQ ID NO: 124182 - protein, 9 aa, Homo sapiens
TRSGGGDLT

SEQ ID NO: 124183 - protein, 9 aa, Homo sapiens
RSGGGDLTL

SEQ ID NO: 124184 - protein, 9 aa, Homo sapiens
SGGGDLTLG

SEQ ID NO: 124185 - protein, 9 aa, Homo sapiens
GGGDLTLGL

SEQ ID NO: 124186 - protein, 9 aa, Homo sapiens
GGDLTLGLE

SEQ ID NO: 124187 - protein, 9 aa, Homo sapiens
GDLTLGLEP

SEQ ID NO: 124188 - protein, 9 aa, Homo sapiens
DLTLGLEPS

SEQ ID NO: 124189 - protein, 9 aa, Homo sapiens
LTLGLEPSE

SEQ ID NO: 124190 - protein, 9 aa, Homo sapiens
TLGLEPSEE

SEQ ID NO: 124191 - protein, 9 aa, Homo sapiens
LGLEPSEEE

SEQ ID NO: 124192 - protein, 9 aa, Homo sapiens
GLEPSEEEA

SEQ ID NO: 124193 - protein, 9 aa, Homo sapiens
LEPSEEEAP

SEQ ID NO: 124194 - protein, 9 aa, Homo sapiens
EPSEEEAPR

SEQ ID NO: 124195 - protein, 9 aa, Homo sapiens
PSEEEAPRS

SEQ ID NO: 124196 - protein, 9 aa, Homo sapiens
SEEEAPRSP

SEQ ID NO: 124197 - protein, 9 aa, Homo sapiens
EEEAPRSPL

SEQ ID NO: 124198 - protein, 9 aa, Homo sapiens
EEAPRSPLA

SEQ ID NO: 124199 - protein, 9 aa, Homo sapiens
EAPRSPLAP

SEQ ID NO: 124200 - protein, 9 aa, Homo sapiens
APRSPLAPS

SEQ ID NO: 124201 - protein, 9 aa, Homo sapiens
PRSPLAPSE

SEQ ID NO: 124202 - protein, 9 aa, Homo sapiens
RSPLAPSEG

SEQ ID NO: 124203 - protein, 9 aa, Homo sapiens
SPLAPSEGA

SEQ ID NO: 124204 - protein, 9 aa, Homo sapiens
PLAPSEGAG

SEQ ID NO: 124205 - protein, 9 aa, Homo sapiens
LAPSEGAGS

SEQ ID NO: 124206 - protein, 9 aa, Homo sapiens
APSEGAGSD

SEQ ID NO: 124207 - protein, 9 aa, Homo sapiens
PSEGAGSDV

SEQ ID NO: 124208 - protein, 9 aa, Homo sapiens
SEGAGSDVF

SEQ ID NO: 124209 - protein, 9 aa, Homo sapiens
EGAGSDVFD

SEQ ID NO: 124210 - protein, 9 aa, Homo sapiens
GAGSDVFDG

SEQ ID NO: 124211 - protein, 9 aa, Homo sapiens
AGSDVFDGD

SEQ ID NO: 124212 - protein, 9 aa, Homo sapiens
GSDVFDGDL

SEQ ID NO: 124213 - protein, 9 aa, Homo sapiens
SDVFDGDLG

SEQ ID NO: 124214 - protein, 9 aa, Homo sapiens
DVFDGDLGM

SEQ ID NO: 124215 - protein, 9 aa, Homo sapiens
VFDGDLGMG

SEQ ID NO: 124216 - protein, 9 aa, Homo sapiens
FDGDLGMGA

SEQ ID NO: 124217 - protein, 9 aa, Homo sapiens
DGDLGMGAA

SEQ ID NO: 124218 - protein, 9 aa, Homo sapiens
GDLGMGAAK

SEQ ID NO: 124219 - protein, 9 aa, Homo sapiens
DLGMGAAKG

SEQ ID NO: 124220 - protein, 9 aa, Homo sapiens
LGMGAAKGL

SEQ ID NO: 124221 - protein, 9 aa, Homo sapiens
GMGAAKGLQ

SEQ ID NO: 124222 - protein, 9 aa, Homo sapiens
MGAAKGLQS

SEQ ID NO: 124223 - protein, 9 aa, Homo sapiens
GAAKGLQSL

SEQ ID NO: 124224 - protein, 9 aa, Homo sapiens
AAKGLQSLP

SEQ ID NO: 124225 - protein, 9 aa, Homo sapiens
AKGLQSLPT

SEQ ID NO: 124226 - protein, 9 aa, Homo sapiens
KGLQSLPTH

SEQ ID NO: 124227 - protein, 9 aa, Homo sapiens
GLQSLPTHD

SEQ ID NO: 124228 - protein, 9 aa, Homo sapiens
LQSLPTHDP

SEQ ID NO: 124229 - protein, 9 aa, Homo sapiens
QSLPTHDPS

SEQ ID NO: 124230 - protein, 9 aa, Homo sapiens
SLPTHDPSP

SEQ ID NO: 124231 - protein, 9 aa, Homo sapiens
LPTHDPSPL

SEQ ID NO: 124232 - protein, 9 aa, Homo sapiens
PTHDPSPLQ

SEQ ID NO: 124233 - protein, 9 aa, Homo sapiens
THDPSPLQR

SEQ ID NO: 124234 - protein, 9 aa, Homo sapiens
HDPSPLQRY

SEQ ID NO: 124235 - protein, 9 aa, Homo sapiens
DPSPLQRYS

SEQ ID NO: 124236 - protein, 9 aa, Homo sapiens
PSPLQRYSE

SEQ ID NO: 124237 - protein, 9 aa, Homo sapiens
SPLQRYSED

SEQ ID NO: 124238 - protein, 9 aa, Homo sapiens
PLQRYSEDP

SEQ ID NO: 124239 - protein, 9 aa, Homo sapiens
LQRYSEDPT

SEQ ID NO: 124240 - protein, 9 aa, Homo sapiens
QRYSEDPTV

SEQ ID NO: 124241 - protein, 9 aa, Homo sapiens
RYSEDPTVP

SEQ ID NO: 124242 - protein, 9 aa, Homo sapiens
YSEDPTVPL

SEQ ID NO: 124243 - protein, 9 aa, Homo sapiens
SEDPTVPLP

SEQ ID NO: 124244 - protein, 9 aa, Homo sapiens
EDPTVPLPS

SEQ ID NO: 124245 - protein, 9 aa, Homo sapiens
DPTVPLPSE

SEQ ID NO: 124246 - protein, 9 aa, Homo sapiens
PTVPLPSET

SEQ ID NO: 124247 - protein, 9 aa, Homo sapiens
TVPLPSETD

SEQ ID NO: 124248 - protein, 9 aa, Homo sapiens
VPLPSETDG

SEQ ID NO: 124249 - protein, 9 aa, Homo sapiens
PLPSETDGY

SEQ ID NO: 124250 - protein, 9 aa, Homo sapiens
LPSETDGYV

SEQ ID NO: 124251 - protein, 9 aa, Homo sapiens
PSETDGYVA

SEQ ID NO: 124252 - protein, 9 aa, Homo sapiens
SETDGYVAP

SEQ ID NO: 124253 - protein, 9 aa, Homo sapiens
ETDGYVAPL

SEQ ID NO: 124254 - protein, 9 aa, Homo sapiens
TDGYVAPLT

SEQ ID NO: 124255 - protein, 9 aa, Homo sapiens
DGYVAPLTC

SEQ ID NO: 124256 - protein, 9 aa, Homo sapiens
GYVAPLTCS

SEQ ID NO: 124257 - protein, 9 aa, Homo sapiens
YVAPLTCSP

SEQ ID NO: 124258 - protein, 9 aa, Homo sapiens
VAPLTCSPQ

SEQ ID NO: 124259 - protein, 9 aa, Homo sapiens
APLTCSPQP

SEQ ID NO: 124260 - protein, 9 aa, Homo sapiens
PLTCSPQPE

SEQ ID NO: 124261 - protein, 9 aa, Homo sapiens
LTCSPQPEY

SEQ ID NO: 124262 - protein, 9 aa, Homo sapiens
TCSPQPEYV

SEQ ID NO: 124263 - protein, 9 aa, Homo sapiens
CSPQPEYVN

SEQ ID NO: 124264 - protein, 9 aa, Homo sapiens
SPQPEYVNQ

SEQ ID NO: 124265 - protein, 9 aa, Homo sapiens
PQPEYVNQP

SEQ ID NO: 124266 - protein, 9 aa, Homo sapiens
QPEYVNQPD

SEQ ID NO: 124267 - protein, 9 aa, Homo sapiens
PEYVNQPDV

SEQ ID NO: 124268 - protein, 9 aa, Homo sapiens
EYVNQPDVR

SEQ ID NO: 124269 - protein, 9 aa, Homo sapiens
YVNQPDVRP

SEQ ID NO: 124270 - protein, 9 aa, Homo sapiens
VNQPDVRPQ

SEQ ID NO: 124271 - protein, 9 aa, Homo sapiens
NQPDVRPQP

SEQ ID NO: 124272 - protein, 9 aa, Homo sapiens
QPDVRPQPP

SEQ ID NO: 124273 - protein, 9 aa, Homo sapiens
PDVRPQPPS

SEQ ID NO: 124274 - protein, 9 aa, Homo sapiens
DVRPQPPSP

SEQ ID NO: 124275 - protein, 9 aa, Homo sapiens
VRPQPPSPR

SEQ ID NO: 124276 - protein, 9 aa, Homo sapiens
RPQPPSPRE

SEQ ID NO: 124277 - protein, 9 aa, Homo sapiens
PQPPSPREG

SEQ ID NO: 124278 - protein, 9 aa, Homo sapiens
QPPSPREGP

SEQ ID NO: 124279 - protein, 9 aa, Homo sapiens
PPSPREGPL

SEQ ID NO: 124280 - protein, 9 aa, Homo sapiens
PSPREGPLP

SEQ ID NO: 124281 - protein, 9 aa, Homo sapiens
SPREGPLPA

SEQ ID NO: 124282 - protein, 9 aa, Homo sapiens
PREGPLPAA

SEQ ID NO: 124283 - protein, 9 aa, Homo sapiens
REGPLPAAR

SEQ ID NO: 124284 - protein, 9 aa, Homo sapiens
EGPLPAARP

SEQ ID NO: 124285 - protein, 9 aa, Homo sapiens
GPLPAARPA

SEQ ID NO: 124286 - protein, 9 aa, Homo sapiens
PLPAARPAG

SEQ ID NO: 124287 - protein, 9 aa, Homo sapiens
LPAARPAGA

SEQ ID NO: 124288 - protein, 9 aa, Homo sapiens
PAARPAGAT

SEQ ID NO: 124289 - protein, 9 aa, Homo sapiens
AARPAGATL

SEQ ID NO: 124290 - protein, 9 aa, Homo sapiens
ARPAGATLE

SEQ ID NO: 124291 - protein, 9 aa, Homo sapiens
RPAGATLER

SEQ ID NO: 124292 - protein, 9 aa, Homo sapiens
PAGATLERP

SEQ ID NO: 124293 - protein, 9 aa, Homo sapiens
AGATLERPK

SEQ ID NO: 124294 - protein, 9 aa, Homo sapiens
GATLERPKT

SEQ ID NO: 124295 - protein, 9 aa, Homo sapiens
ATLERPKTL

SEQ ID NO: 124296 - protein, 9 aa, Homo sapiens
TLERPKTLS

SEQ ID NO: 124297 - protein, 9 aa, Homo sapiens
LERPKTLSP

SEQ ID NO: 124298 - protein, 9 aa, Homo sapiens
ERPKTLSPG

SEQ ID NO: 124299 - protein, 9 aa, Homo sapiens
RPKTLSPGK

SEQ ID NO: 124300 - protein, 9 aa, Homo sapiens
PKTLSPGKN

SEQ ID NO: 124301 - protein, 9 aa, Homo sapiens
KTLSPGKNG

SEQ ID NO: 124302 - protein, 9 aa, Homo sapiens
TLSPGKNGV

SEQ ID NO: 124303 - protein, 9 aa, Homo sapiens
LSPGKNGVV

SEQ ID NO: 124304 - protein, 9 aa, Homo sapiens
SPGKNGVVK

SEQ ID NO: 124305 - protein, 9 aa, Homo sapiens
PGKNGVVKD

SEQ ID NO: 124306 - protein, 9 aa, Homo sapiens
GKNGVVKDV

SEQ ID NO: 124307 - protein, 9 aa, Homo sapiens
KNGVVKDVF

SEQ ID NO: 124308 - protein, 9 aa, Homo sapiens
NGVVKDVFA

SEQ ID NO: 124309 - protein, 9 aa, Homo sapiens
GVVKDVFAF

SEQ ID NO: 124310 - protein, 9 aa, Homo sapiens
VVKDVFAFG

SEQ ID NO: 124311 - protein, 9 aa, Homo sapiens
VKDVFAFGG

SEQ ID NO: 124312 - protein, 9 aa, Homo sapiens
KDVFAFGGA

SEQ ID NO: 124313 - protein, 9 aa, Homo sapiens
DVFAFGGAV

SEQ ID NO: 124314 - protein, 9 aa, Homo sapiens
VFAFGGAVE

SEQ ID NO: 124315 - protein, 9 aa, Homo sapiens
FAFGGAVEN

SEQ ID NO: 124316 - protein, 9 aa, Homo sapiens
AFGGAVENP

SEQ ID NO: 124317 - protein, 9 aa, Homo sapiens
FGGAVENPE

SEQ ID NO: 124318 - protein, 9 aa, Homo sapiens
GGAVENPEY

SEQ ID NO: 124319 - protein, 9 aa, Homo sapiens
GAVENPEYL

SEQ ID NO: 124320 - protein, 9 aa, Homo sapiens
AVENPEYLT

SEQ ID NO: 124321 - protein, 9 aa, Homo sapiens
VENPEYLTP

SEQ ID NO: 124322 - protein, 9 aa, Homo sapiens
ENPEYLTPQ

SEQ ID NO: 124323 - protein, 9 aa, Homo sapiens
NPEYLTPQG

SEQ ID NO: 124324 - protein, 9 aa, Homo sapiens
PEYLTPQGG

SEQ ID NO: 124325 - protein, 9 aa, Homo sapiens
EYLTPQGGA

SEQ ID NO: 124326 - protein, 9 aa, Homo sapiens
YLTPQGGAA

SEQ ID NO: 124327 - protein, 9 aa, Homo sapiens
LTPQGGAAP

SEQ ID NO: 124328 - protein, 9 aa, Homo sapiens
TPQGGAAPQ

SEQ ID NO: 124329 - protein, 9 aa, Homo sapiens
PQGGAAPQP

SEQ ID NO: 124330 - protein, 9 aa, Homo sapiens
QGGAAPQPH

SEQ ID NO: 124331 - protein, 9 aa, Homo sapiens
GGAAPQPHP

SEQ ID NO: 124332 - protein, 9 aa, Homo sapiens
GAAPQPHPP

SEQ ID NO: 124333 - protein, 9 aa, Homo sapiens
AAPQPHPPP

SEQ ID NO: 124334 - protein, 9 aa, Homo sapiens
APQPHPPPA

SEQ ID NO: 124335 - protein, 9 aa, Homo sapiens
PQPHPPPAF

SEQ ID NO: 124336 - protein, 9 aa, Homo sapiens
QPHPPPAFS

SEQ ID NO: 124337 - protein, 9 aa, Homo sapiens
PHPPPAFSP

SEQ ID NO: 124338 - protein, 9 aa, Homo sapiens
HPPPAFSPA

SEQ ID NO: 124339 - protein, 9 aa, Homo sapiens
PPPAFSPAF

SEQ ID NO: 124340 - protein, 9 aa, Homo sapiens
PPAFSPAFD

SEQ ID NO: 124341 - protein, 9 aa, Homo sapiens
PAFSPAFDN

SEQ ID NO: 124342 - protein, 9 aa, Homo sapiens
AFSPAFDNL

SEQ ID NO: 124343 - protein, 9 aa, Homo sapiens
FSPAFDNLY

SEQ ID NO: 124344 - protein, 9 aa, Homo sapiens
SPAFDNLYY

SEQ ID NO: 124345 - protein, 9 aa, Homo sapiens
PAFDNLYYW

SEQ ID NO: 124346 - protein, 9 aa, Homo sapiens
AFDNLYYWD

SEQ ID NO: 124347 - protein, 9 aa, Homo sapiens
FDNLYYWDQ

SEQ ID NO: 124348 - protein, 9 aa, Homo sapiens
DNLYYWDQD

SEQ ID NO: 124349 - protein, 9 aa, Homo sapiens
NLYYWDQDP

SEQ ID NO: 124350 - protein, 9 aa, Homo sapiens
LYYWDQDPP

SEQ ID NO: 124351 - protein, 9 aa, Homo sapiens
YYWDQDPPE

SEQ ID NO: 124352 - protein, 9 aa, Homo sapiens
YWDQDPPER

SEQ ID NO: 124353 - protein, 9 aa, Homo sapiens
WDQDPPERG

SEQ ID NO: 124354 - protein, 9 aa, Homo sapiens
DQDPPERGA

SEQ ID NO: 124355 - protein, 9 aa, Homo sapiens
QDPPERGAP

SEQ ID NO: 124356 - protein, 9 aa, Homo sapiens
DPPERGAPP

SEQ ID NO: 124357 - protein, 9 aa, Homo sapiens
PPERGAPPS

SEQ ID NO: 124358 - protein, 9 aa, Homo sapiens
PERGAPPST

SEQ ID NO: 124359 - protein, 9 aa, Homo sapiens
ERGAPPSTF

SEQ ID NO: 124360 - protein, 9 aa, Homo sapiens
RGAPPSTFK

SEQ ID NO: 124361 - protein, 9 aa, Homo sapiens
GAPPSTFKG

SEQ ID NO: 124362 - protein, 9 aa, Homo sapiens
APPSTFKGT

SEQ ID NO: 124363 - protein, 9 aa, Homo sapiens
PPSTFKGTP

SEQ ID NO: 124364 - protein, 9 aa, Homo sapiens
PSTFKGTPT

SEQ ID NO: 124365 - protein, 9 aa, Homo sapiens
STFKGTPTA

SEQ ID NO: 124366 - protein, 9 aa, Homo sapiens
TFKGTPTAE

SEQ ID NO: 124367 - protein, 9 aa, Homo sapiens
FKGTPTAEN

SEQ ID NO: 124368 - protein, 9 aa, Homo sapiens
KGTPTAENP

SEQ ID NO: 124369 - protein, 9 aa, Homo sapiens
GTPTAENPE

SEQ ID NO: 124370 - protein, 9 aa, Homo sapiens
TPTAENPEY

SEQ ID NO: 124371 - protein, 9 aa, Homo sapiens
PTAENPEYL

SEQ ID NO: 124372 - protein, 9 aa, Homo sapiens
TAENPEYLG

SEQ ID NO: 124373 - protein, 9 aa, Homo sapiens
AENPEYLGL

SEQ ID NO: 124374 - protein, 9 aa, Homo sapiens
ENPEYLGLD

SEQ ID NO: 124375 - protein, 9 aa, Homo sapiens
NPEYLGLDV

SEQ ID NO: 124376 - protein, 9 aa, Homo sapiens
PEYLGLDVP

SEQ ID NO: 124377 - protein, 9 aa, Homo sapiens
EYLGLDVPV

SEQ ID NO: 124378 - protein, 9 aa, Homo sapiens
MQRLCVYVL

SEQ ID NO: 124379 - protein, 9 aa, Homo sapiens
QRLCVYVLI

SEQ ID NO: 124380 - protein, 9 aa, Homo sapiens
RLCVYVLIF

SEQ ID NO: 124381 - protein, 9 aa, Homo sapiens
LCVYVLIFA

SEQ ID NO: 124382 - protein, 9 aa, Homo sapiens
CVYVLIFAL

SEQ ID NO: 124383 - protein, 9 aa, Homo sapiens
VYVLIFALA

SEQ ID NO: 124384 - protein, 9 aa, Homo sapiens
YVLIFALAL

SEQ ID NO: 124385 - protein, 9 aa, Homo sapiens
VLIFALALA

SEQ ID NO: 124386 - protein, 9 aa, Homo sapiens
LIFALALAA

SEQ ID NO: 124387 - protein, 9 aa, Homo sapiens
IFALALAAF

SEQ ID NO: 124388 - protein, 9 aa, Homo sapiens
FALALAAFS

SEQ ID NO: 124389 - protein, 9 aa, Homo sapiens
ALALAAFSE

SEQ ID NO: 124390 - protein, 9 aa, Homo sapiens
LALAAFSEA

SEQ ID NO: 124391 - protein, 9 aa, Homo sapiens
ALAAFSEAS

SEQ ID NO: 124392 - protein, 9 aa, Homo sapiens
LAAFSEASW

SEQ ID NO: 124393 - protein, 9 aa, Homo sapiens
AAFSEASWK

SEQ ID NO: 124394 - protein, 9 aa, Homo sapiens
AFSEASWKP

SEQ ID NO: 124395 - protein, 9 aa, Homo sapiens
FSEASWKPR

SEQ ID NO: 124396 - protein, 9 aa, Homo sapiens
SEASWKPRS

SEQ ID NO: 124397 - protein, 9 aa, Homo sapiens
EASWKPRSQ

SEQ ID NO: 124398 - protein, 9 aa, Homo sapiens
ASWKPRSQQ

SEQ ID NO: 124399 - protein, 9 aa, Homo sapiens
SWKPRSQQP

SEQ ID NO: 124400 - protein, 9 aa, Homo sapiens
WKPRSQQPD

SEQ ID NO: 124401 - protein, 9 aa, Homo sapiens
KPRSQQPDA

SEQ ID NO: 124402 - protein, 9 aa, Homo sapiens
PRSQQPDAP

SEQ ID NO: 124403 - protein, 9 aa, Homo sapiens
RSQQPDAPL

SEQ ID NO: 124404 - protein, 9 aa, Homo sapiens
SQQPDAPLG

SEQ ID NO: 124405 - protein, 9 aa, Homo sapiens
QQPDAPLGT

SEQ ID NO: 124406 - protein, 9 aa, Homo sapiens
QPDAPLGTG

SEQ ID NO: 124407 - protein, 9 aa, Homo sapiens
PDAPLGTGA

SEQ ID NO: 124408 - protein, 9 aa, Homo sapiens
DAPLGTGAN

SEQ ID NO: 124409 - protein, 9 aa, Homo sapiens
APLGTGANR

SEQ ID NO: 124410 - protein, 9 aa, Homo sapiens
PLGTGANRD

SEQ ID NO: 124411 - protein, 9 aa, Homo sapiens
LGTGANRDL

SEQ ID NO: 124412 - protein, 9 aa, Homo sapiens
GTGANRDLE

SEQ ID NO: 124413 - protein, 9 aa, Homo sapiens
TGANRDLEL

SEQ ID NO: 124414 - protein, 9 aa, Homo sapiens
GANRDLELP

SEQ ID NO: 124415 - protein, 9 aa, Homo sapiens
ANRDLELPW

SEQ ID NO: 124416 - protein, 9 aa, Homo sapiens
NRDLELPWL

SEQ ID NO: 124417 - protein, 9 aa, Homo sapiens
RDLELPWLE

SEQ ID NO: 124418 - protein, 9 aa, Homo sapiens
DLELPWLEQ

SEQ ID NO: 124419 - protein, 9 aa, Homo sapiens
LELPWLEQQ

SEQ ID NO: 124420 - protein, 9 aa, Homo sapiens
ELPWLEQQG

SEQ ID NO: 124421 - protein, 9 aa, Homo sapiens
LPWLEQQGP

SEQ ID NO: 124422 - protein, 9 aa, Homo sapiens
PWLEQQGPA

SEQ ID NO: 124423 - protein, 9 aa, Homo sapiens
WLEQQGPAS

SEQ ID NO: 124424 - protein, 9 aa, Homo sapiens
LEQQGPASH

SEQ ID NO: 124425 - protein, 9 aa, Homo sapiens
EQQGPASHH

SEQ ID NO: 124426 - protein, 9 aa, Homo sapiens
QQGPASHHR

SEQ ID NO: 124427 - protein, 9 aa, Homo sapiens
QGPASHHRR

SEQ ID NO: 124428 - protein, 9 aa, Homo sapiens
GPASHHRRQ

SEQ ID NO: 124429 - protein, 9 aa, Homo sapiens
PASHHRRQL

SEQ ID NO: 124430 - protein, 9 aa, Homo sapiens
ASHHRRQLG

SEQ ID NO: 124431 - protein, 9 aa, Homo sapiens
SHHRRQLGP

SEQ ID NO: 124432 - protein, 9 aa, Homo sapiens
HHRRQLGPQ

SEQ ID NO: 124433 - protein, 9 aa, Homo sapiens
HRRQLGPQG

SEQ ID NO: 124434 - protein, 9 aa, Homo sapiens
RRQLGPQGP

SEQ ID NO: 124435 - protein, 9 aa, Homo sapiens
RQLGPQGPP

SEQ ID NO: 124436 - protein, 9 aa, Homo sapiens
QLGPQGPPH

SEQ ID NO: 124437 - protein, 9 aa, Homo sapiens
LGPQGPPHL

SEQ ID NO: 124438 - protein, 9 aa, Homo sapiens
GPQGPPHLV

SEQ ID NO: 124439 - protein, 9 aa, Homo sapiens
PQGPPHLVA

SEQ ID NO: 124440 - protein, 9 aa, Homo sapiens
QGPPHLVAD

SEQ ID NO: 124441 - protein, 9 aa, Homo sapiens
GPPHLVADP

SEQ ID NO: 124442 - protein, 9 aa, Homo sapiens
PPHLVADPS

SEQ ID NO: 124443 - protein, 9 aa, Homo sapiens
PHLVADPSK

SEQ ID NO: 124444 - protein, 9 aa, Homo sapiens
HLVADPSKK

SEQ ID NO: 124445 - protein, 9 aa, Homo sapiens
LVADPSKKQ

SEQ ID NO: 124446 - protein, 9 aa, Homo sapiens
VADPSKKQG

SEQ ID NO: 124447 - protein, 9 aa, Homo sapiens
ADPSKKQGP

SEQ ID NO: 124448 - protein, 9 aa, Homo sapiens
DPSKKQGPW

SEQ ID NO: 124449 - protein, 9 aa, Homo sapiens
PSKKQGPWL

SEQ ID NO: 124450 - protein, 9 aa, Homo sapiens
SKKQGPWLE

SEQ ID NO: 124451 - protein, 9 aa, Homo sapiens
KKQGPWLEE

SEQ ID NO: 124452 - protein, 9 aa, Homo sapiens
KQGPWLEEE

SEQ ID NO: 124453 - protein, 9 aa, Homo sapiens
QGPWLEEEE

SEQ ID NO: 124454 - protein, 9 aa, Homo sapiens
GPWLEEEEE

SEQ ID NO: 124455 - protein, 9 aa, Homo sapiens
PWLEEEEEA

SEQ ID NO: 124456 - protein, 9 aa, Homo sapiens
WLEEEEEAY

SEQ ID NO: 124457 - protein, 9 aa, Homo sapiens
LEEEEEAYG

SEQ ID NO: 124458 - protein, 9 aa, Homo sapiens
EEEEEAYGW

SEQ ID NO: 124459 - protein, 9 aa, Homo sapiens
EEEEAYGWM

SEQ ID NO: 124460 - protein, 9 aa, Homo sapiens
EEEAYGWMD

SEQ ID NO: 124461 - protein, 9 aa, Homo sapiens
EEAYGWMDF

SEQ ID NO: 124462 - protein, 9 aa, Homo sapiens
EAYGWMDFG

SEQ ID NO: 124463 - protein, 9 aa, Homo sapiens
AYGWMDFGR

SEQ ID NO: 124464 - protein, 9 aa, Homo sapiens
YGWMDFGRR

SEQ ID NO: 124465 - protein, 9 aa, Homo sapiens
GWMDFGRRS

SEQ ID NO: 124466 - protein, 9 aa, Homo sapiens
WMDFGRRSA

SEQ ID NO: 124467 - protein, 9 aa, Homo sapiens
MDFGRRSAE

SEQ ID NO: 124468 - protein, 9 aa, Homo sapiens
DFGRRSAED

SEQ ID NO: 124469 - protein, 9 aa, Homo sapiens
FGRRSAEDE

SEQ ID NO: 124470 - protein, 9 aa, Homo sapiens
GRRSAEDEN

SEQ ID NO: 124471 - protein, 9 aa, Homo sapiens
MKPIQKLLA

SEQ ID NO: 124472 - protein, 9 aa, Homo sapiens
KPIQKLLAG

SEQ ID NO: 124473 - protein, 9 aa, Homo sapiens
PIQKLLAGL

SEQ ID NO: 124474 - protein, 9 aa, Homo sapiens
IQKLLAGLI

SEQ ID NO: 124475 - protein, 9 aa, Homo sapiens
QKLLAGLIL

SEQ ID NO: 124476 - protein, 9 aa, Homo sapiens
KLLAGLILL

SEQ ID NO: 124477 - protein, 9 aa, Homo sapiens
LLAGLILLT

SEQ ID NO: 124478 - protein, 9 aa, Homo sapiens
LAGLILLTW

SEQ ID NO: 124479 - protein, 9 aa, Homo sapiens
AGLILLTWC

SEQ ID NO: 124480 - protein, 9 aa, Homo sapiens
GLILLTWCV

SEQ ID NO: 124481 - protein, 9 aa, Homo sapiens
LILLTWCVE

SEQ ID NO: 124482 - protein, 9 aa, Homo sapiens
ILLTWCVEG

SEQ ID NO: 124483 - protein, 9 aa, Homo sapiens
LLTWCVEGC

SEQ ID NO: 124484 - protein, 9 aa, Homo sapiens
LTWCVEGCS

SEQ ID NO: 124485 - protein, 9 aa, Homo sapiens
TWCVEGCSS

SEQ ID NO: 124486 - protein, 9 aa, Homo sapiens
WCVEGCSSQ

SEQ ID NO: 124487 - protein, 9 aa, Homo sapiens
CVEGCSSQH

SEQ ID NO: 124488 - protein, 9 aa, Homo sapiens
VEGCSSQHW

SEQ ID NO: 124489 - protein, 9 aa, Homo sapiens
EGCSSQHWS

SEQ ID NO: 124490 - protein, 9 aa, Homo sapiens
GCSSQHWSY

SEQ ID NO: 124491 - protein, 9 aa, Homo sapiens
CSSQHWSYG

SEQ ID NO: 124492 - protein, 9 aa, Homo sapiens
SSQHWSYGL

SEQ ID NO: 124493 - protein, 9 aa, Homo sapiens
SQHWSYGLR

SEQ ID NO: 124494 - protein, 9 aa, Homo sapiens
QHWSYGLRP

SEQ ID NO: 124495 - protein, 9 aa, Homo sapiens
HWSYGLRPG

SEQ ID NO: 124496 - protein, 9 aa, Homo sapiens
WSYGLRPGG

SEQ ID NO: 124497 - protein, 9 aa, Homo sapiens
SYGLRPGGK

SEQ ID NO: 124498 - protein, 9 aa, Homo sapiens
YGLRPGGKR

SEQ ID NO: 124499 - protein, 9 aa, Homo sapiens
GLRPGGKRD

SEQ ID NO: 124500 - protein, 9 aa, Homo sapiens
LRPGGKRDA

SEQ ID NO: 124501 - protein, 9 aa, Homo sapiens
RPGGKRDAE

SEQ ID NO: 124502 - protein, 9 aa, Homo sapiens
PGGKRDAEN

SEQ ID NO: 124503 - protein, 9 aa, Homo sapiens
GGKRDAENL

SEQ ID NO: 124504 - protein, 9 aa, Homo sapiens
GKRDAENLI

SEQ ID NO: 124505 - protein, 9 aa, Homo sapiens
KRDAENLID

SEQ ID NO: 124506 - protein, 9 aa, Homo sapiens
RDAENLIDS

SEQ ID NO: 124507 - protein, 9 aa, Homo sapiens
DAENLIDSF

SEQ ID NO: 124508 - protein, 9 aa, Homo sapiens
AENLIDSFQ

SEQ ID NO: 124509 - protein, 9 aa, Homo sapiens
ENLIDSFQE

SEQ ID NO: 124510 - protein, 9 aa, Homo sapiens
NLIDSFQEI

SEQ ID NO: 124511 - protein, 9 aa, Homo sapiens
LIDSFQEIV

SEQ ID NO: 124512 - protein, 9 aa, Homo sapiens
IDSFQEIVK

SEQ ID NO: 124513 - protein, 9 aa, Homo sapiens
DSFQEIVKE

SEQ ID NO: 124514 - protein, 9 aa, Homo sapiens
SFQEIVKEV

SEQ ID NO: 124515 - protein, 9 aa, Homo sapiens
FQEIVKEVG

SEQ ID NO: 124516 - protein, 9 aa, Homo sapiens
QEIVKEVGQ

SEQ ID NO: 124517 - protein, 9 aa, Homo sapiens
EIVKEVGQL

SEQ ID NO: 124518 - protein, 9 aa, Homo sapiens
IVKEVGQLA

SEQ ID NO: 124519 - protein, 9 aa, Homo sapiens
VKEVGQLAE

SEQ ID NO: 124520 - protein, 9 aa, Homo sapiens
KEVGQLAET

SEQ ID NO: 124521 - protein, 9 aa, Homo sapiens
EVGQLAETQ

SEQ ID NO: 124522 - protein, 9 aa, Homo sapiens
VGQLAETQR

SEQ ID NO: 124523 - protein, 9 aa, Homo sapiens
GQLAETQRF

SEQ ID NO: 124524 - protein, 9 aa, Homo sapiens
QLAETQRFE

SEQ ID NO: 124525 - protein, 9 aa, Homo sapiens
LAETQRFEC

SEQ ID NO: 124526 - protein, 9 aa, Homo sapiens
AETQRFECT

SEQ ID NO: 124527 - protein, 9 aa, Homo sapiens
ETQRFECTT

SEQ ID NO: 124528 - protein, 9 aa, Homo sapiens
TQRFECTTH

SEQ ID NO: 124529 - protein, 9 aa, Homo sapiens
QRFECTTHQ

SEQ ID NO: 124530 - protein, 9 aa, Homo sapiens
RFECTTHQP

SEQ ID NO: 124531 - protein, 9 aa, Homo sapiens
FECTTHQPR

SEQ ID NO: 124532 - protein, 9 aa, Homo sapiens
ECTTHQPRS

SEQ ID NO: 124533 - protein, 9 aa, Homo sapiens
CTTHQPRSP

SEQ ID NO: 124534 - protein, 9 aa, Homo sapiens
TTHQPRSPL

SEQ ID NO: 124535 - protein, 9 aa, Homo sapiens
THQPRSPLR

SEQ ID NO: 124536 - protein, 9 aa, Homo sapiens
HQPRSPLRD

SEQ ID NO: 124537 - protein, 9 aa, Homo sapiens
QPRSPLRDL

SEQ ID NO: 124538 - protein, 9 aa, Homo sapiens
PRSPLRDLK

SEQ ID NO: 124539 - protein, 9 aa, Homo sapiens
RSPLRDLKG

SEQ ID NO: 124540 - protein, 9 aa, Homo sapiens
SPLRDLKGA

SEQ ID NO: 124541 - protein, 9 aa, Homo sapiens
PLRDLKGAL

SEQ ID NO: 124542 - protein, 9 aa, Homo sapiens
LRDLKGALE

SEQ ID NO: 124543 - protein, 9 aa, Homo sapiens
RDLKGALES

SEQ ID NO: 124544 - protein, 9 aa, Homo sapiens
DLKGALESL

SEQ ID NO: 124545 - protein, 9 aa, Homo sapiens
LKGALESLI

SEQ ID NO: 124546 - protein, 9 aa, Homo sapiens
KGALESLIE

SEQ ID NO: 124547 - protein, 9 aa, Homo sapiens
GALESLIEE

SEQ ID NO: 124548 - protein, 9 aa, Homo sapiens
ALESLIEEE

SEQ ID NO: 124549 - protein, 9 aa, Homo sapiens
LESLIEEET

SEQ ID NO: 124550 - protein, 9 aa, Homo sapiens
ESLIEEETG

SEQ ID NO: 124551 - protein, 9 aa, Homo sapiens
SLIEEETGQ

SEQ ID NO: 124552 - protein, 9 aa, Homo sapiens
LIEEETGQK

SEQ ID NO: 124553 - protein, 9 aa, Homo sapiens
IEEETGQKK

SEQ ID NO: 124554 - protein, 9 aa, Homo sapiens
EEETGQKKI

SEQ ID NO: 124555 - protein, 9 aa, Homo sapiens
MDLVLKRCL

SEQ ID NO: 124556 - protein, 9 aa, Homo sapiens
DLVLKRCLL

SEQ ID NO: 124557 - protein, 9 aa, Homo sapiens
LVLKRCLLH

SEQ ID NO: 124558 - protein, 9 aa, Homo sapiens
VLKRCLLHL

SEQ ID NO: 124559 - protein, 9 aa, Homo sapiens
LKRCLLHLA

SEQ ID NO: 124560 - protein, 9 aa, Homo sapiens
KRCLLHLAV

SEQ ID NO: 124561 - protein, 9 aa, Homo sapiens
RCLLHLAVI

SEQ ID NO: 124562 - protein, 9 aa, Homo sapiens
CLLHLAVIG

SEQ ID NO: 124563 - protein, 9 aa, Homo sapiens
LLHLAVIGA

SEQ ID NO: 124564 - protein, 9 aa, Homo sapiens
LHLAVIGAL

SEQ ID NO: 124565 - protein, 9 aa, Homo sapiens
HLAVIGALL

SEQ ID NO: 124566 - protein, 9 aa, Homo sapiens
LAVIGALLA

SEQ ID NO: 124567 - protein, 9 aa, Homo sapiens
AVIGALLAV

SEQ ID NO: 124568 - protein, 9 aa, Homo sapiens
VIGALLAVG

SEQ ID NO: 124569 - protein, 9 aa, Homo sapiens
IGALLAVGA

SEQ ID NO: 124570 - protein, 9 aa, Homo sapiens
GALLAVGAT

SEQ ID NO: 124571 - protein, 9 aa, Homo sapiens
ALLAVGATK

SEQ ID NO: 124572 - protein, 9 aa, Homo sapiens
LLAVGATKV

SEQ ID NO: 124573 - protein, 9 aa, Homo sapiens
LAVGATKVP

SEQ ID NO: 124574 - protein, 9 aa, Homo sapiens
AVGATKVPR

SEQ ID NO: 124575 - protein, 9 aa, Homo sapiens
VGATKVPRN

SEQ ID NO: 124576 - protein, 9 aa, Homo sapiens
GATKVPRNQ

SEQ ID NO: 124577 - protein, 9 aa, Homo sapiens
ATKVPRNQD

SEQ ID NO: 124578 - protein, 9 aa, Homo sapiens
TKVPRNQDW

SEQ ID NO: 124579 - protein, 9 aa, Homo sapiens
KVPRNQDWL

SEQ ID NO: 124580 - protein, 9 aa, Homo sapiens
VPRNQDWLG

SEQ ID NO: 124581 - protein, 9 aa, Homo sapiens
PRNQDWLGV

SEQ ID NO: 124582 - protein, 9 aa, Homo sapiens
RNQDWLGVS

SEQ ID NO: 124583 - protein, 9 aa, Homo sapiens
NQDWLGVSR

SEQ ID NO: 124584 - protein, 9 aa, Homo sapiens
QDWLGVSRQ

SEQ ID NO: 124585 - protein, 9 aa, Homo sapiens
DWLGVSRQL

SEQ ID NO: 124586 - protein, 9 aa, Homo sapiens
WLGVSRQLR

SEQ ID NO: 124587 - protein, 9 aa, Homo sapiens
LGVSRQLRT

SEQ ID NO: 124588 - protein, 9 aa, Homo sapiens
GVSRQLRTK

SEQ ID NO: 124589 - protein, 9 aa, Homo sapiens
VSRQLRTKA

SEQ ID NO: 124590 - protein, 9 aa, Homo sapiens
SRQLRTKAW

SEQ ID NO: 124591 - protein, 9 aa, Homo sapiens
RQLRTKAWN

SEQ ID NO: 124592 - protein, 9 aa, Homo sapiens
QLRTKAWNR

SEQ ID NO: 124593 - protein, 9 aa, Homo sapiens
LRTKAWNRQ

SEQ ID NO: 124594 - protein, 9 aa, Homo sapiens
RTKAWNRQL

SEQ ID NO: 124595 - protein, 9 aa, Homo sapiens
TKAWNRQLY

SEQ ID NO: 124596 - protein, 9 aa, Homo sapiens
KAWNRQLYP

SEQ ID NO: 124597 - protein, 9 aa, Homo sapiens
AWNRQLYPE

SEQ ID NO: 124598 - protein, 9 aa, Homo sapiens
WNRQLYPEW

SEQ ID NO: 124599 - protein, 9 aa, Homo sapiens
NRQLYPEWT

SEQ ID NO: 124600 - protein, 9 aa, Homo sapiens
RQLYPEWTE

SEQ ID NO: 124601 - protein, 9 aa, Homo sapiens
QLYPEWTEA

SEQ ID NO: 124602 - protein, 9 aa, Homo sapiens
LYPEWTEAQ

SEQ ID NO: 124603 - protein, 9 aa, Homo sapiens
YPEWTEAQR

SEQ ID NO: 124604 - protein, 9 aa, Homo sapiens
PEWTEAQRL

SEQ ID NO: 124605 - protein, 9 aa, Homo sapiens
EWTEAQRLD

SEQ ID NO: 124606 - protein, 9 aa, Homo sapiens
WTEAQRLDC

SEQ ID NO: 124607 - protein, 9 aa, Homo sapiens
TEAQRLDCW

SEQ ID NO: 124608 - protein, 9 aa, Homo sapiens
EAQRLDCWR

SEQ ID NO: 124609 - protein, 9 aa, Homo sapiens
AQRLDCWRG

SEQ ID NO: 124610 - protein, 9 aa, Homo sapiens
QRLDCWRGG

SEQ ID NO: 124611 - protein, 9 aa, Homo sapiens
RLDCWRGGQ

SEQ ID NO: 124612 - protein, 9 aa, Homo sapiens
LDCWRGGQV

SEQ ID NO: 124613 - protein, 9 aa, Homo sapiens
DCWRGGQVS

SEQ ID NO: 124614 - protein, 9 aa, Homo sapiens
CWRGGQVSL

SEQ ID NO: 124615 - protein, 9 aa, Homo sapiens
WRGGQVSLK

SEQ ID NO: 124616 - protein, 9 aa, Homo sapiens
RGGQVSLKV

SEQ ID NO: 124617 - protein, 9 aa, Homo sapiens
GGQVSLKVS

SEQ ID NO: 124618 - protein, 9 aa, Homo sapiens
GQVSLKVSN

SEQ ID NO: 124619 - protein, 9 aa, Homo sapiens
QVSLKVSND

SEQ ID NO: 124620 - protein, 9 aa, Homo sapiens
VSLKVSNDG

SEQ ID NO: 124621 - protein, 9 aa, Homo sapiens
SLKVSNDGP

SEQ ID NO: 124622 - protein, 9 aa, Homo sapiens
LKVSNDGPT

SEQ ID NO: 124623 - protein, 9 aa, Homo sapiens
KVSNDGPTL

SEQ ID NO: 124624 - protein, 9 aa, Homo sapiens
VSNDGPTLI

SEQ ID NO: 124625 - protein, 9 aa, Homo sapiens
SNDGPTLIG

SEQ ID NO: 124626 - protein, 9 aa, Homo sapiens
NDGPTLIGA

SEQ ID NO: 124627 - protein, 9 aa, Homo sapiens
DGPTLIGAN

SEQ ID NO: 124628 - protein, 9 aa, Homo sapiens
GPTLIGANA

SEQ ID NO: 124629 - protein, 9 aa, Homo sapiens
PTLIGANAS

SEQ ID NO: 124630 - protein, 9 aa, Homo sapiens
TLIGANASF

SEQ ID NO: 124631 - protein, 9 aa, Homo sapiens
LIGANASFS

SEQ ID NO: 124632 - protein, 9 aa, Homo sapiens
IGANASFSI

SEQ ID NO: 124633 - protein, 9 aa, Homo sapiens
GANASFSIA

SEQ ID NO: 124634 - protein, 9 aa, Homo sapiens
ANASFSIAL

SEQ ID NO: 124635 - protein, 9 aa, Homo sapiens
NASFSIALN

SEQ ID NO: 124636 - protein, 9 aa, Homo sapiens
ASFSIALNF

SEQ ID NO: 124637 - protein, 9 aa, Homo sapiens
SFSIALNFP

SEQ ID NO: 124638 - protein, 9 aa, Homo sapiens
FSIALNFPG

SEQ ID NO: 124639 - protein, 9 aa, Homo sapiens
SIALNFPGS

SEQ ID NO: 124640 - protein, 9 aa, Homo sapiens
IALNFPGSQ

SEQ ID NO: 124641 - protein, 9 aa, Homo sapiens
ALNFPGSQK

SEQ ID NO: 124642 - protein, 9 aa, Homo sapiens
LNFPGSQKV

SEQ ID NO: 124643 - protein, 9 aa, Homo sapiens
NFPGSQKVL

SEQ ID NO: 124644 - protein, 9 aa, Homo sapiens
FPGSQKVLP

SEQ ID NO: 124645 - protein, 9 aa, Homo sapiens
PGSQKVLPD

SEQ ID NO: 124646 - protein, 9 aa, Homo sapiens
GSQKVLPDG

SEQ ID NO: 124647 - protein, 9 aa, Homo sapiens
SQKVLPDGQ

SEQ ID NO: 124648 - protein, 9 aa, Homo sapiens
QKVLPDGQV

SEQ ID NO: 124649 - protein, 9 aa, Homo sapiens
KVLPDGQVI

SEQ ID NO: 124650 - protein, 9 aa, Homo sapiens
VLPDGQVIW

SEQ ID NO: 124651 - protein, 9 aa, Homo sapiens
LPDGQVIWV

SEQ ID NO: 124652 - protein, 9 aa, Homo sapiens
PDGQVIWVN

SEQ ID NO: 124653 - protein, 9 aa, Homo sapiens
DGQVIWVNN

SEQ ID NO: 124654 - protein, 9 aa, Homo sapiens
GQVIWVNNT

SEQ ID NO: 124655 - protein, 9 aa, Homo sapiens
QVIWVNNTI

SEQ ID NO: 124656 - protein, 9 aa, Homo sapiens
VIWVNNTII

SEQ ID NO: 124657 - protein, 9 aa, Homo sapiens
IWVNNTIIN

SEQ ID NO: 124658 - protein, 9 aa, Homo sapiens
WVNNTIING

SEQ ID NO: 124659 - protein, 9 aa, Homo sapiens
VNNTIINGS

SEQ ID NO: 124660 - protein, 9 aa, Homo sapiens
NNTIINGSQ

SEQ ID NO: 124661 - protein, 9 aa, Homo sapiens
NTIINGSQV

SEQ ID NO: 124662 - protein, 9 aa, Homo sapiens
TIINGSQVW

SEQ ID NO: 124663 - protein, 9 aa, Homo sapiens
IINGSQVWG

SEQ ID NO: 124664 - protein, 9 aa, Homo sapiens
INGSQVWGG

SEQ ID NO: 124665 - protein, 9 aa, Homo sapiens
NGSQVWGGQ

SEQ ID NO: 124666 - protein, 9 aa, Homo sapiens
GSQVWGGQP

SEQ ID NO: 124667 - protein, 9 aa, Homo sapiens
SQVWGGQPV

SEQ ID NO: 124668 - protein, 9 aa, Homo sapiens
QVWGGQPVY

SEQ ID NO: 124669 - protein, 9 aa, Homo sapiens
VWGGQPVYP

SEQ ID NO: 124670 - protein, 9 aa, Homo sapiens
WGGQPVYPQ

SEQ ID NO: 124671 - protein, 9 aa, Homo sapiens
GGQPVYPQE

SEQ ID NO: 124672 - protein, 9 aa, Homo sapiens
GQPVYPQET

SEQ ID NO: 124673 - protein, 9 aa, Homo sapiens
QPVYPQETD

SEQ ID NO: 124674 - protein, 9 aa, Homo sapiens
PVYPQETDD

SEQ ID NO: 124675 - protein, 9 aa, Homo sapiens
VYPQETDDA

SEQ ID NO: 124676 - protein, 9 aa, Homo sapiens
YPQETDDAC

SEQ ID NO: 124677 - protein, 9 aa, Homo sapiens
PQETDDACI

SEQ ID NO: 124678 - protein, 9 aa, Homo sapiens
QETDDACIF

SEQ ID NO: 124679 - protein, 9 aa, Homo sapiens
ETDDACIFP

SEQ ID NO: 124680 - protein, 9 aa, Homo sapiens
TDDACIFPD

SEQ ID NO: 124681 - protein, 9 aa, Homo sapiens
DDACIFPDG

SEQ ID NO: 124682 - protein, 9 aa, Homo sapiens
DACIFPDGG

SEQ ID NO: 124683 - protein, 9 aa, Homo sapiens
ACIFPDGGP

SEQ ID NO: 124684 - protein, 9 aa, Homo sapiens
CIFPDGGPC

SEQ ID NO: 124685 - protein, 9 aa, Homo sapiens
IFPDGGPCP

SEQ ID NO: 124686 - protein, 9 aa, Homo sapiens
FPDGGPCPS

SEQ ID NO: 124687 - protein, 9 aa, Homo sapiens
PDGGPCPSG

SEQ ID NO: 124688 - protein, 9 aa, Homo sapiens
DGGPCPSGS

SEQ ID NO: 124689 - protein, 9 aa, Homo sapiens
GGPCPSGSW

SEQ ID NO: 124690 - protein, 9 aa, Homo sapiens
GPCPSGSWS

SEQ ID NO: 124691 - protein, 9 aa, Homo sapiens
PCPSGSWSQ

SEQ ID NO: 124692 - protein, 9 aa, Homo sapiens
CPSGSWSQK

SEQ ID NO: 124693 - protein, 9 aa, Homo sapiens
PSGSWSQKR

SEQ ID NO: 124694 - protein, 9 aa, Homo sapiens
SGSWSQKRS

SEQ ID NO: 124695 - protein, 9 aa, Homo sapiens
GSWSQKRSF

SEQ ID NO: 124696 - protein, 9 aa, Homo sapiens
SWSQKRSFV

SEQ ID NO: 124697 - protein, 9 aa, Homo sapiens
WSQKRSFVY

SEQ ID NO: 124698 - protein, 9 aa, Homo sapiens
SQKRSFVYV

SEQ ID NO: 124699 - protein, 9 aa, Homo sapiens
QKRSFVYVW

SEQ ID NO: 124700 - protein, 9 aa, Homo sapiens
KRSFVYVWK

SEQ ID NO: 124701 - protein, 9 aa, Homo sapiens
RSFVYVWKT

SEQ ID NO: 124702 - protein, 9 aa, Homo sapiens
SFVYVWKTW

SEQ ID NO: 124703 - protein, 9 aa, Homo sapiens
FVYVWKTWG

SEQ ID NO: 124704 - protein, 9 aa, Homo sapiens
VYVWKTWGQ

SEQ ID NO: 124705 - protein, 9 aa, Homo sapiens
YVWKTWGQY

SEQ ID NO: 124706 - protein, 9 aa, Homo sapiens
VWKTWGQYW

SEQ ID NO: 124707 - protein, 9 aa, Homo sapiens
WKTWGQYWQ

SEQ ID NO: 124708 - protein, 9 aa, Homo sapiens
KTWGQYWQV

SEQ ID NO: 124709 - protein, 9 aa, Homo sapiens
TWGQYWQVL

SEQ ID NO: 124710 - protein, 9 aa, Homo sapiens
WGQYWQVLG

SEQ ID NO: 124711 - protein, 9 aa, Homo sapiens
GQYWQVLGG

SEQ ID NO: 124712 - protein, 9 aa, Homo sapiens
QYWQVLGGP

SEQ ID NO: 124713 - protein, 9 aa, Homo sapiens
YWQVLGGPV

SEQ ID NO: 124714 - protein, 9 aa, Homo sapiens
WQVLGGPVS

SEQ ID NO: 124715 - protein, 9 aa, Homo sapiens
QVLGGPVSG

SEQ ID NO: 124716 - protein, 9 aa, Homo sapiens
VLGGPVSGL

SEQ ID NO: 124717 - protein, 9 aa, Homo sapiens
LGGPVSGLS

SEQ ID NO: 124718 - protein, 9 aa, Homo sapiens
GGPVSGLSI

SEQ ID NO: 124719 - protein, 9 aa, Homo sapiens
GPVSGLSIG

SEQ ID NO: 124720 - protein, 9 aa, Homo sapiens
PVSGLSIGT

SEQ ID NO: 124721 - protein, 9 aa, Homo sapiens
VSGLSIGTG

SEQ ID NO: 124722 - protein, 9 aa, Homo sapiens
SGLSIGTGR

SEQ ID NO: 124723 - protein, 9 aa, Homo sapiens
GLSIGTGRA

SEQ ID NO: 124724 - protein, 9 aa, Homo sapiens
LSIGTGRAM

SEQ ID NO: 124725 - protein, 9 aa, Homo sapiens
SIGTGRAML

SEQ ID NO: 124726 - protein, 9 aa, Homo sapiens
IGTGRAMLG

SEQ ID NO: 124727 - protein, 9 aa, Homo sapiens
GTGRAMLGT

SEQ ID NO: 124728 - protein, 9 aa, Homo sapiens
TGRAMLGTH

SEQ ID NO: 124729 - protein, 9 aa, Homo sapiens
GRAMLGTHT

SEQ ID NO: 124730 - protein, 9 aa, Homo sapiens
RAMLGTHTM

SEQ ID NO: 124731 - protein, 9 aa, Homo sapiens
AMLGTHTME

SEQ ID NO: 124732 - protein, 9 aa, Homo sapiens
MLGTHTMEV

SEQ ID NO: 124733 - protein, 9 aa, Homo sapiens
LGTHTMEVT

SEQ ID NO: 124734 - protein, 9 aa, Homo sapiens
GTHTMEVTV

SEQ ID NO: 124735 - protein, 9 aa, Homo sapiens
THTMEVTVY

SEQ ID NO: 124736 - protein, 9 aa, Homo sapiens
HTMEVTVYH

SEQ ID NO: 124737 - protein, 9 aa, Homo sapiens
TMEVTVYHR

SEQ ID NO: 124738 - protein, 9 aa, Homo sapiens
MEVTVYHRR

SEQ ID NO: 124739 - protein, 9 aa, Homo sapiens
EVTVYHRRG

SEQ ID NO: 124740 - protein, 9 aa, Homo sapiens
VTVYHRRGS

SEQ ID NO: 124741 - protein, 9 aa, Homo sapiens
TVYHRRGSR

SEQ ID NO: 124742 - protein, 9 aa, Homo sapiens
VYHRRGSRS

SEQ ID NO: 124743 - protein, 9 aa, Homo sapiens
YHRRGSRSY

SEQ ID NO: 124744 - protein, 9 aa, Homo sapiens
HRRGSRSYV

SEQ ID NO: 124745 - protein, 9 aa, Homo sapiens
RRGSRSYVP

SEQ ID NO: 124746 - protein, 9 aa, Homo sapiens
RGSRSYVPL

SEQ ID NO: 124747 - protein, 9 aa, Homo sapiens
GSRSYVPLA

SEQ ID NO: 124748 - protein, 9 aa, Homo sapiens
SRSYVPLAH

SEQ ID NO: 124749 - protein, 9 aa, Homo sapiens
RSYVPLAHS

SEQ ID NO: 124750 - protein, 9 aa, Homo sapiens
SYVPLAHSS

SEQ ID NO: 124751 - protein, 9 aa, Homo sapiens
YVPLAHSSS

SEQ ID NO: 124752 - protein, 9 aa, Homo sapiens
VPLAHSSSA

SEQ ID NO: 124753 - protein, 9 aa, Homo sapiens
PLAHSSSAF

SEQ ID NO: 124754 - protein, 9 aa, Homo sapiens
LAHSSSAFT

SEQ ID NO: 124755 - protein, 9 aa, Homo sapiens
AHSSSAFTI

SEQ ID NO: 124756 - protein, 9 aa, Homo sapiens
HSSSAFTIT

SEQ ID NO: 124757 - protein, 9 aa, Homo sapiens
SSSAFTITD

SEQ ID NO: 124758 - protein, 9 aa, Homo sapiens
SSAFTITDQ

SEQ ID NO: 124759 - protein, 9 aa, Homo sapiens
SAFTITDQV

SEQ ID NO: 124760 - protein, 9 aa, Homo sapiens
AFTITDQVP

SEQ ID NO: 124761 - protein, 9 aa, Homo sapiens
FTITDQVPF

SEQ ID NO: 124762 - protein, 9 aa, Homo sapiens
TITDQVPFS

SEQ ID NO: 124763 - protein, 9 aa, Homo sapiens
ITDQVPFSV

SEQ ID NO: 124764 - protein, 9 aa, Homo sapiens
TDQVPFSVS

SEQ ID NO: 124765 - protein, 9 aa, Homo sapiens
DQVPFSVSV

SEQ ID NO: 124766 - protein, 9 aa, Homo sapiens
QVPFSVSVS

SEQ ID NO: 124767 - protein, 9 aa, Homo sapiens
VPFSVSVSQ

SEQ ID NO: 124768 - protein, 9 aa, Homo sapiens
PFSVSVSQL

SEQ ID NO: 124769 - protein, 9 aa, Homo sapiens
FSVSVSQLR

SEQ ID NO: 124770 - protein, 9 aa, Homo sapiens
SVSVSQLRA

SEQ ID NO: 124771 - protein, 9 aa, Homo sapiens
VSVSQLRAL

SEQ ID NO: 124772 - protein, 9 aa, Homo sapiens
SVSQLRALD

SEQ ID NO: 124773 - protein, 9 aa, Homo sapiens
VSQLRALDG

SEQ ID NO: 124774 - protein, 9 aa, Homo sapiens
SQLRALDGG

SEQ ID NO: 124775 - protein, 9 aa, Homo sapiens
QLRALDGGN

SEQ ID NO: 124776 - protein, 9 aa, Homo sapiens
LRALDGGNK

SEQ ID NO: 124777 - protein, 9 aa, Homo sapiens
RALDGGNKH

SEQ ID NO: 124778 - protein, 9 aa, Homo sapiens
ALDGGNKHF

SEQ ID NO: 124779 - protein, 9 aa, Homo sapiens
LDGGNKHFL

SEQ ID NO: 124780 - protein, 9 aa, Homo sapiens
DGGNKHFLR

SEQ ID NO: 124781 - protein, 9 aa, Homo sapiens
GGNKHFLRN

SEQ ID NO: 124782 - protein, 9 aa, Homo sapiens
GNKHFLRNQ

SEQ ID NO: 124783 - protein, 9 aa, Homo sapiens
NKHFLRNQP

SEQ ID NO: 124784 - protein, 9 aa, Homo sapiens
KHFLRNQPL

SEQ ID NO: 124785 - protein, 9 aa, Homo sapiens
HFLRNQPLT

SEQ ID NO: 124786 - protein, 9 aa, Homo sapiens
FLRNQPLTF

SEQ ID NO: 124787 - protein, 9 aa, Homo sapiens
LRNQPLTFA

SEQ ID NO: 124788 - protein, 9 aa, Homo sapiens
RNQPLTFAL

SEQ ID NO: 124789 - protein, 9 aa, Homo sapiens
NQPLTFALQ

SEQ ID NO: 124790 - protein, 9 aa, Homo sapiens
QPLTFALQL

SEQ ID NO: 124791 - protein, 9 aa, Homo sapiens
PLTFALQLH

SEQ ID NO: 124792 - protein, 9 aa, Homo sapiens
LTFALQLHD

SEQ ID NO: 124793 - protein, 9 aa, Homo sapiens
TFALQLHDP

SEQ ID NO: 124794 - protein, 9 aa, Homo sapiens
FALQLHDPS

SEQ ID NO: 124795 - protein, 9 aa, Homo sapiens
ALQLHDPSG

SEQ ID NO: 124796 - protein, 9 aa, Homo sapiens
LQLHDPSGY

SEQ ID NO: 124797 - protein, 9 aa, Homo sapiens
QLHDPSGYL

SEQ ID NO: 124798 - protein, 9 aa, Homo sapiens
LHDPSGYLA

SEQ ID NO: 124799 - protein, 9 aa, Homo sapiens
HDPSGYLAE

SEQ ID NO: 124800 - protein, 9 aa, Homo sapiens
DPSGYLAEA

SEQ ID NO: 124801 - protein, 9 aa, Homo sapiens
PSGYLAEAD

SEQ ID NO: 124802 - protein, 9 aa, Homo sapiens
SGYLAEADL

SEQ ID NO: 124803 - protein, 9 aa, Homo sapiens
GYLAEADLS

SEQ ID NO: 124804 - protein, 9 aa, Homo sapiens
YLAEADLSY

SEQ ID NO: 124805 - protein, 9 aa, Homo sapiens
LAEADLSYT

SEQ ID NO: 124806 - protein, 9 aa, Homo sapiens
AEADLSYTW

SEQ ID NO: 124807 - protein, 9 aa, Homo sapiens
EADLSYTWD

SEQ ID NO: 124808 - protein, 9 aa, Homo sapiens
ADLSYTWDF

SEQ ID NO: 124809 - protein, 9 aa, Homo sapiens
DLSYTWDFG

SEQ ID NO: 124810 - protein, 9 aa, Homo sapiens
LSYTWDFGD

SEQ ID NO: 124811 - protein, 9 aa, Homo sapiens
SYTWDFGDS

SEQ ID NO: 124812 - protein, 9 aa, Homo sapiens
YTWDFGDSS

SEQ ID NO: 124813 - protein, 9 aa, Homo sapiens
TWDFGDSSG

SEQ ID NO: 124814 - protein, 9 aa, Homo sapiens
WDFGDSSGT

SEQ ID NO: 124815 - protein, 9 aa, Homo sapiens
DFGDSSGTL

SEQ ID NO: 124816 - protein, 9 aa, Homo sapiens
FGDSSGTLI

SEQ ID NO: 124817 - protein, 9 aa, Homo sapiens
GDSSGTLIS

SEQ ID NO: 124818 - protein, 9 aa, Homo sapiens
DSSGTLISR

SEQ ID NO: 124819 - protein, 9 aa, Homo sapiens
SSGTLISRA

SEQ ID NO: 124820 - protein, 9 aa, Homo sapiens
SGTLISRAL

SEQ ID NO: 124821 - protein, 9 aa, Homo sapiens
GTLISRALV

SEQ ID NO: 124822 - protein, 9 aa, Homo sapiens
TLISRALVV

SEQ ID NO: 124823 - protein, 9 aa, Homo sapiens
LISRALVVT

SEQ ID NO: 124824 - protein, 9 aa, Homo sapiens
ISRALVVTH

SEQ ID NO: 124825 - protein, 9 aa, Homo sapiens
SRALVVTHT

SEQ ID NO: 124826 - protein, 9 aa, Homo sapiens
RALVVTHTY

SEQ ID NO: 124827 - protein, 9 aa, Homo sapiens
ALVVTHTYL

SEQ ID NO: 124828 - protein, 9 aa, Homo sapiens
LVVTHTYLE

SEQ ID NO: 124829 - protein, 9 aa, Homo sapiens
VVTHTYLEP

SEQ ID NO: 124830 - protein, 9 aa, Homo sapiens
VTHTYLEPG

SEQ ID NO: 124831 - protein, 9 aa, Homo sapiens
THTYLEPGP

SEQ ID NO: 124832 - protein, 9 aa, Homo sapiens
HTYLEPGPV

SEQ ID NO: 124833 - protein, 9 aa, Homo sapiens
TYLEPGPVT

SEQ ID NO: 124834 - protein, 9 aa, Homo sapiens
YLEPGPVTA

SEQ ID NO: 124835 - protein, 9 aa, Homo sapiens
LEPGPVTAQ

SEQ ID NO: 124836 - protein, 9 aa, Homo sapiens
EPGPVTAQV

SEQ ID NO: 124837 - protein, 9 aa, Homo sapiens
PGPVTAQVV

SEQ ID NO: 124838 - protein, 9 aa, Homo sapiens
GPVTAQVVL

SEQ ID NO: 124839 - protein, 9 aa, Homo sapiens
PVTAQVVLQ

SEQ ID NO: 124840 - protein, 9 aa, Homo sapiens
VTAQVVLQA

SEQ ID NO: 124841 - protein, 9 aa, Homo sapiens
TAQVVLQAA

SEQ ID NO: 124842 - protein, 9 aa, Homo sapiens
AQVVLQAAI

SEQ ID NO: 124843 - protein, 9 aa, Homo sapiens
QVVLQAAIP

SEQ ID NO: 124844 - protein, 9 aa, Homo sapiens
VVLQAAIPL

SEQ ID NO: 124845 - protein, 9 aa, Homo sapiens
VLQAAIPLT

SEQ ID NO: 124846 - protein, 9 aa, Homo sapiens
LQAAIPLTS

SEQ ID NO: 124847 - protein, 9 aa, Homo sapiens
QAAIPLTSC

SEQ ID NO: 124848 - protein, 9 aa, Homo sapiens
AAIPLTSCG

SEQ ID NO: 124849 - protein, 9 aa, Homo sapiens
AIPLTSCGS

SEQ ID NO: 124850 - protein, 9 aa, Homo sapiens
IPLTSCGSS

SEQ ID NO: 124851 - protein, 9 aa, Homo sapiens
PLTSCGSSP

SEQ ID NO: 124852 - protein, 9 aa, Homo sapiens
LTSCGSSPV

SEQ ID NO: 124853 - protein, 9 aa, Homo sapiens
TSCGSSPVP

SEQ ID NO: 124854 - protein, 9 aa, Homo sapiens
SCGSSPVPG

SEQ ID NO: 124855 - protein, 9 aa, Homo sapiens
CGSSPVPGT

SEQ ID NO: 124856 - protein, 9 aa, Homo sapiens
GSSPVPGTT

SEQ ID NO: 124857 - protein, 9 aa, Homo sapiens
SSPVPGTTD

SEQ ID NO: 124858 - protein, 9 aa, Homo sapiens
SPVPGTTDG

SEQ ID NO: 124859 - protein, 9 aa, Homo sapiens
PVPGTTDGH

SEQ ID NO: 124860 - protein, 9 aa, Homo sapiens
VPGTTDGHR

SEQ ID NO: 124861 - protein, 9 aa, Homo sapiens
PGTTDGHRP

SEQ ID NO: 124862 - protein, 9 aa, Homo sapiens
GTTDGHRPT

SEQ ID NO: 124863 - protein, 9 aa, Homo sapiens
TTDGHRPTA

SEQ ID NO: 124864 - protein, 9 aa, Homo sapiens
TDGHRPTAE

SEQ ID NO: 124865 - protein, 9 aa, Homo sapiens
DGHRPTAEA

SEQ ID NO: 124866 - protein, 9 aa, Homo sapiens
GHRPTAEAP

SEQ ID NO: 124867 - protein, 9 aa, Homo sapiens
HRPTAEAPN

SEQ ID NO: 124868 - protein, 9 aa, Homo sapiens
RPTAEAPNT

SEQ ID NO: 124869 - protein, 9 aa, Homo sapiens
PTAEAPNTT

SEQ ID NO: 124870 - protein, 9 aa, Homo sapiens
TAEAPNTTA

SEQ ID NO: 124871 - protein, 9 aa, Homo sapiens
AEAPNTTAG

SEQ ID NO: 124872 - protein, 9 aa, Homo sapiens
EAPNTTAGQ

SEQ ID NO: 124873 - protein, 9 aa, Homo sapiens
APNTTAGQV

SEQ ID NO: 124874 - protein, 9 aa, Homo sapiens
PNTTAGQVP

SEQ ID NO: 124875 - protein, 9 aa, Homo sapiens
NTTAGQVPT

SEQ ID NO: 124876 - protein, 9 aa, Homo sapiens
TTAGQVPTT

SEQ ID NO: 124877 - protein, 9 aa, Homo sapiens
TAGQVPTTE

SEQ ID NO: 124878 - protein, 9 aa, Homo sapiens
AGQVPTTEV

SEQ ID NO: 124879 - protein, 9 aa, Homo sapiens
GQVPTTEVV

SEQ ID NO: 124880 - protein, 9 aa, Homo sapiens
QVPTTEVVG

SEQ ID NO: 124881 - protein, 9 aa, Homo sapiens
VPTTEVVGT

SEQ ID NO: 124882 - protein, 9 aa, Homo sapiens
PTTEVVGTT

SEQ ID NO: 124883 - protein, 9 aa, Homo sapiens
TTEVVGTTP

SEQ ID NO: 124884 - protein, 9 aa, Homo sapiens
TEVVGTTPG

SEQ ID NO: 124885 - protein, 9 aa, Homo sapiens
EVVGTTPGQ

SEQ ID NO: 124886 - protein, 9 aa, Homo sapiens
VVGTTPGQA

SEQ ID NO: 124887 - protein, 9 aa, Homo sapiens
VGTTPGQAP

SEQ ID NO: 124888 - protein, 9 aa, Homo sapiens
GTTPGQAPT

SEQ ID NO: 124889 - protein, 9 aa, Homo sapiens
TTPGQAPTA

SEQ ID NO: 124890 - protein, 9 aa, Homo sapiens
TPGQAPTAE

SEQ ID NO: 124891 - protein, 9 aa, Homo sapiens
PGQAPTAEP

SEQ ID NO: 124892 - protein, 9 aa, Homo sapiens
GQAPTAEPS

SEQ ID NO: 124893 - protein, 9 aa, Homo sapiens
QAPTAEPSG

SEQ ID NO: 124894 - protein, 9 aa, Homo sapiens
APTAEPSGT

SEQ ID NO: 124895 - protein, 9 aa, Homo sapiens
PTAEPSGTT

SEQ ID NO: 124896 - protein, 9 aa, Homo sapiens
TAEPSGTTS

SEQ ID NO: 124897 - protein, 9 aa, Homo sapiens
AEPSGTTSV

SEQ ID NO: 124898 - protein, 9 aa, Homo sapiens
EPSGTTSVQ

SEQ ID NO: 124899 - protein, 9 aa, Homo sapiens
PSGTTSVQV

SEQ ID NO: 124900 - protein, 9 aa, Homo sapiens
SGTTSVQVP

SEQ ID NO: 124901 - protein, 9 aa, Homo sapiens
GTTSVQVPT

SEQ ID NO: 124902 - protein, 9 aa, Homo sapiens
TTSVQVPTT

SEQ ID NO: 124903 - protein, 9 aa, Homo sapiens
TSVQVPTTE

SEQ ID NO: 124904 - protein, 9 aa, Homo sapiens
SVQVPTTEV

SEQ ID NO: 124905 - protein, 9 aa, Homo sapiens
VQVPTTEVI

SEQ ID NO: 124906 - protein, 9 aa, Homo sapiens
QVPTTEVIS

SEQ ID NO: 124907 - protein, 9 aa, Homo sapiens
VPTTEVIST

SEQ ID NO: 124908 - protein, 9 aa, Homo sapiens
PTTEVISTA

SEQ ID NO: 124909 - protein, 9 aa, Homo sapiens
TTEVISTAP

SEQ ID NO: 124910 - protein, 9 aa, Homo sapiens
TEVISTAPV

SEQ ID NO: 124911 - protein, 9 aa, Homo sapiens
EVISTAPVQ

SEQ ID NO: 124912 - protein, 9 aa, Homo sapiens
VISTAPVQM

SEQ ID NO: 124913 - protein, 9 aa, Homo sapiens
ISTAPVQMP

SEQ ID NO: 124914 - protein, 9 aa, Homo sapiens
STAPVQMPT

SEQ ID NO: 124915 - protein, 9 aa, Homo sapiens
TAPVQMPTA

SEQ ID NO: 124916 - protein, 9 aa, Homo sapiens
APVQMPTAE

SEQ ID NO: 124917 - protein, 9 aa, Homo sapiens
PVQMPTAES

SEQ ID NO: 124918 - protein, 9 aa, Homo sapiens
VQMPTAEST

SEQ ID NO: 124919 - protein, 9 aa, Homo sapiens
QMPTAESTG

SEQ ID NO: 124920 - protein, 9 aa, Homo sapiens
MPTAESTGM

SEQ ID NO: 124921 - protein, 9 aa, Homo sapiens
PTAESTGMT

SEQ ID NO: 124922 - protein, 9 aa, Homo sapiens
TAESTGMTP

SEQ ID NO: 124923 - protein, 9 aa, Homo sapiens
AESTGMTPE

SEQ ID NO: 124924 - protein, 9 aa, Homo sapiens
ESTGMTPEK

SEQ ID NO: 124925 - protein, 9 aa, Homo sapiens
STGMTPEKV

SEQ ID NO: 124926 - protein, 9 aa, Homo sapiens
TGMTPEKVP

SEQ ID NO: 124927 - protein, 9 aa, Homo sapiens
GMTPEKVPV

SEQ ID NO: 124928 - protein, 9 aa, Homo sapiens
MTPEKVPVS

SEQ ID NO: 124929 - protein, 9 aa, Homo sapiens
TPEKVPVSE

SEQ ID NO: 124930 - protein, 9 aa, Homo sapiens
PEKVPVSEV

SEQ ID NO: 124931 - protein, 9 aa, Homo sapiens
EKVPVSEVM

SEQ ID NO: 124932 - protein, 9 aa, Homo sapiens
KVPVSEVMG

SEQ ID NO: 124933 - protein, 9 aa, Homo sapiens
VPVSEVMGT

SEQ ID NO: 124934 - protein, 9 aa, Homo sapiens
PVSEVMGTT

SEQ ID NO: 124935 - protein, 9 aa, Homo sapiens
VSEVMGTTL

SEQ ID NO: 124936 - protein, 9 aa, Homo sapiens
SEVMGTTLA

SEQ ID NO: 124937 - protein, 9 aa, Homo sapiens
EVMGTTLAE

SEQ ID NO: 124938 - protein, 9 aa, Homo sapiens
VMGTTLAEM

SEQ ID NO: 124939 - protein, 9 aa, Homo sapiens
MGTTLAEMS

SEQ ID NO: 124940 - protein, 9 aa, Homo sapiens
GTTLAEMST

SEQ ID NO: 124941 - protein, 9 aa, Homo sapiens
TTLAEMSTP

SEQ ID NO: 124942 - protein, 9 aa, Homo sapiens
TLAEMSTPE

SEQ ID NO: 124943 - protein, 9 aa, Homo sapiens
LAEMSTPEA

SEQ ID NO: 124944 - protein, 9 aa, Homo sapiens
AEMSTPEAT

SEQ ID NO: 124945 - protein, 9 aa, Homo sapiens
EMSTPEATG

SEQ ID NO: 124946 - protein, 9 aa, Homo sapiens
MSTPEATGM

SEQ ID NO: 124947 - protein, 9 aa, Homo sapiens
STPEATGMT

SEQ ID NO: 124948 - protein, 9 aa, Homo sapiens
TPEATGMTP

SEQ ID NO: 124949 - protein, 9 aa, Homo sapiens
PEATGMTPA

SEQ ID NO: 124950 - protein, 9 aa, Homo sapiens
EATGMTPAE

SEQ ID NO: 124951 - protein, 9 aa, Homo sapiens
ATGMTPAEV

SEQ ID NO: 124952 - protein, 9 aa, Homo sapiens
TGMTPAEVS

SEQ ID NO: 124953 - protein, 9 aa, Homo sapiens
GMTPAEVSI

SEQ ID NO: 124954 - protein, 9 aa, Homo sapiens
MTPAEVSIV

SEQ ID NO: 124955 - protein, 9 aa, Homo sapiens
TPAEVSIVV

SEQ ID NO: 124956 - protein, 9 aa, Homo sapiens
PAEVSIVVL

SEQ ID NO: 124957 - protein, 9 aa, Homo sapiens
AEVSIVVLS

SEQ ID NO: 124958 - protein, 9 aa, Homo sapiens
EVSIVVLSG

SEQ ID NO: 124959 - protein, 9 aa, Homo sapiens
VSIVVLSGT

SEQ ID NO: 124960 - protein, 9 aa, Homo sapiens
SIVVLSGTT

SEQ ID NO: 124961 - protein, 9 aa, Homo sapiens
IVVLSGTTA

SEQ ID NO: 124962 - protein, 9 aa, Homo sapiens
VVLSGTTAA

SEQ ID NO: 124963 - protein, 9 aa, Homo sapiens
VLSGTTAAQ

SEQ ID NO: 124964 - protein, 9 aa, Homo sapiens
LSGTTAAQV

SEQ ID NO: 124965 - protein, 9 aa, Homo sapiens
SGTTAAQVT

SEQ ID NO: 124966 - protein, 9 aa, Homo sapiens
GTTAAQVTT

SEQ ID NO: 124967 - protein, 9 aa, Homo sapiens
TTAAQVTTT

SEQ ID NO: 124968 - protein, 9 aa, Homo sapiens
TAAQVTTTE

SEQ ID NO: 124969 - protein, 9 aa, Homo sapiens
AAQVTTTEW

SEQ ID NO: 124970 - protein, 9 aa, Homo sapiens
AQVTTTEWV

SEQ ID NO: 124971 - protein, 9 aa, Homo sapiens
QVTTTEWVE

SEQ ID NO: 124972 - protein, 9 aa, Homo sapiens
VTTTEWVET

SEQ ID NO: 124973 - protein, 9 aa, Homo sapiens
TTTEWVETT

SEQ ID NO: 124974 - protein, 9 aa, Homo sapiens
TTEWVETTA

SEQ ID NO: 124975 - protein, 9 aa, Homo sapiens
TEWVETTAR

SEQ ID NO: 124976 - protein, 9 aa, Homo sapiens
EWVETTARE

SEQ ID NO: 124977 - protein, 9 aa, Homo sapiens
WVETTAREL

SEQ ID NO: 124978 - protein, 9 aa, Homo sapiens
VETTARELP

SEQ ID NO: 124979 - protein, 9 aa, Homo sapiens
ETTARELPI

SEQ ID NO: 124980 - protein, 9 aa, Homo sapiens
TTARELPIP

SEQ ID NO: 124981 - protein, 9 aa, Homo sapiens
TARELPIPE

SEQ ID NO: 124982 - protein, 9 aa, Homo sapiens
ARELPIPEP

SEQ ID NO: 124983 - protein, 9 aa, Homo sapiens
RELPIPEPE

SEQ ID NO: 124984 - protein, 9 aa, Homo sapiens
ELPIPEPEG

SEQ ID NO: 124985 - protein, 9 aa, Homo sapiens
LPIPEPEGP

SEQ ID NO: 124986 - protein, 9 aa, Homo sapiens
PIPEPEGPD

SEQ ID NO: 124987 - protein, 9 aa, Homo sapiens
IPEPEGPDA

SEQ ID NO: 124988 - protein, 9 aa, Homo sapiens
PEPEGPDAS

SEQ ID NO: 124989 - protein, 9 aa, Homo sapiens
EPEGPDASS

SEQ ID NO: 124990 - protein, 9 aa, Homo sapiens
PEGPDASSI

SEQ ID NO: 124991 - protein, 9 aa, Homo sapiens
EGPDASSIM

SEQ ID NO: 124992 - protein, 9 aa, Homo sapiens
GPDASSIMS

SEQ ID NO: 124993 - protein, 9 aa, Homo sapiens
PDASSIMST

SEQ ID NO: 124994 - protein, 9 aa, Homo sapiens
DASSIMSTE

SEQ ID NO: 124995 - protein, 9 aa, Homo sapiens
ASSIMSTES

SEQ ID NO: 124996 - protein, 9 aa, Homo sapiens
SSIMSTESI

SEQ ID NO: 124997 - protein, 9 aa, Homo sapiens
SIMSTESIT

SEQ ID NO: 124998 - protein, 9 aa, Homo sapiens
IMSTESITG

SEQ ID NO: 124999 - protein, 9 aa, Homo sapiens
MSTESITGS

SEQ ID NO: 125000 - protein, 9 aa, Homo sapiens
STESITGSL

SEQ ID NO: 125001 - protein, 9 aa, Homo sapiens
TESITGSLG

SEQ ID NO: 125002 - protein, 9 aa, Homo sapiens
ESITGSLGP

SEQ ID NO: 125003 - protein, 9 aa, Homo sapiens
SITGSLGPL

SEQ ID NO: 125004 - protein, 9 aa, Homo sapiens
ITGSLGPLL

SEQ ID NO: 125005 - protein, 9 aa, Homo sapiens
TGSLGPLLD

SEQ ID NO: 125006 - protein, 9 aa, Homo sapiens
GSLGPLLDG

SEQ ID NO: 125007 - protein, 9 aa, Homo sapiens
SLGPLLDGT

SEQ ID NO: 125008 - protein, 9 aa, Homo sapiens
LGPLLDGTA

SEQ ID NO: 125009 - protein, 9 aa, Homo sapiens
GPLLDGTAT

SEQ ID NO: 125010 - protein, 9 aa, Homo sapiens
PLLDGTATL

SEQ ID NO: 125011 - protein, 9 aa, Homo sapiens
LLDGTATLR

SEQ ID NO: 125012 - protein, 9 aa, Homo sapiens
LDGTATLRL

SEQ ID NO: 125013 - protein, 9 aa, Homo sapiens
DGTATLRLV

SEQ ID NO: 125014 - protein, 9 aa, Homo sapiens
GTATLRLVK

SEQ ID NO: 125015 - protein, 9 aa, Homo sapiens
TATLRLVKR

SEQ ID NO: 125016 - protein, 9 aa, Homo sapiens
ATLRLVKRQ

SEQ ID NO: 125017 - protein, 9 aa, Homo sapiens
TLRLVKRQV

SEQ ID NO: 125018 - protein, 9 aa, Homo sapiens
LRLVKRQVP

SEQ ID NO: 125019 - protein, 9 aa, Homo sapiens
RLVKRQVPL

SEQ ID NO: 125020 - protein, 9 aa, Homo sapiens
LVKRQVPLD

SEQ ID NO: 125021 - protein, 9 aa, Homo sapiens
VKRQVPLDC

SEQ ID NO: 125022 - protein, 9 aa, Homo sapiens
KRQVPLDCV

SEQ ID NO: 125023 - protein, 9 aa, Homo sapiens
RQVPLDCVL

SEQ ID NO: 125024 - protein, 9 aa, Homo sapiens
QVPLDCVLY

SEQ ID NO: 125025 - protein, 9 aa, Homo sapiens
VPLDCVLYR

SEQ ID NO: 125026 - protein, 9 aa, Homo sapiens
PLDCVLYRY

SEQ ID NO: 125027 - protein, 9 aa, Homo sapiens
LDCVLYRYG

SEQ ID NO: 125028 - protein, 9 aa, Homo sapiens
DCVLYRYGS

SEQ ID NO: 125029 - protein, 9 aa, Homo sapiens
CVLYRYGSF

SEQ ID NO: 125030 - protein, 9 aa, Homo sapiens
VLYRYGSFS

SEQ ID NO: 125031 - protein, 9 aa, Homo sapiens
LYRYGSFSV

SEQ ID NO: 125032 - protein, 9 aa, Homo sapiens
YRYGSFSVT

SEQ ID NO: 125033 - protein, 9 aa, Homo sapiens
RYGSFSVTL

SEQ ID NO: 125034 - protein, 9 aa, Homo sapiens
YGSFSVTLD

SEQ ID NO: 125035 - protein, 9 aa, Homo sapiens
GSFSVTLDI

SEQ ID NO: 125036 - protein, 9 aa, Homo sapiens
SFSVTLDIV

SEQ ID NO: 125037 - protein, 9 aa, Homo sapiens
FSVTLDIVQ

SEQ ID NO: 125038 - protein, 9 aa, Homo sapiens
SVTLDIVQG

SEQ ID NO: 125039 - protein, 9 aa, Homo sapiens
VTLDIVQGI

SEQ ID NO: 125040 - protein, 9 aa, Homo sapiens
TLDIVQGIE

SEQ ID NO: 125041 - protein, 9 aa, Homo sapiens
LDIVQGIES

SEQ ID NO: 125042 - protein, 9 aa, Homo sapiens
DIVQGIESA

SEQ ID NO: 125043 - protein, 9 aa, Homo sapiens
IVQGIESAE

SEQ ID NO: 125044 - protein, 9 aa, Homo sapiens
VQGIESAEI

SEQ ID NO: 125045 - protein, 9 aa, Homo sapiens
QGIESAEIL

SEQ ID NO: 125046 - protein, 9 aa, Homo sapiens
GIESAEILQ

SEQ ID NO: 125047 - protein, 9 aa, Homo sapiens
IESAEILQA

SEQ ID NO: 125048 - protein, 9 aa, Homo sapiens
ESAEILQAV

SEQ ID NO: 125049 - protein, 9 aa, Homo sapiens
SAEILQAVP

SEQ ID NO: 125050 - protein, 9 aa, Homo sapiens
AEILQAVPS

SEQ ID NO: 125051 - protein, 9 aa, Homo sapiens
EILQAVPSG

SEQ ID NO: 125052 - protein, 9 aa, Homo sapiens
ILQAVPSGE

SEQ ID NO: 125053 - protein, 9 aa, Homo sapiens
LQAVPSGEG

SEQ ID NO: 125054 - protein, 9 aa, Homo sapiens
QAVPSGEGD

SEQ ID NO: 125055 - protein, 9 aa, Homo sapiens
AVPSGEGDA

SEQ ID NO: 125056 - protein, 9 aa, Homo sapiens
VPSGEGDAF

SEQ ID NO: 125057 - protein, 9 aa, Homo sapiens
PSGEGDAFE

SEQ ID NO: 125058 - protein, 9 aa, Homo sapiens
SGEGDAFEL

SEQ ID NO: 125059 - protein, 9 aa, Homo sapiens
GEGDAFELT

SEQ ID NO: 125060 - protein, 9 aa, Homo sapiens
EGDAFELTV

SEQ ID NO: 125061 - protein, 9 aa, Homo sapiens
GDAFELTVS

SEQ ID NO: 125062 - protein, 9 aa, Homo sapiens
DAFELTVSC

SEQ ID NO: 125063 - protein, 9 aa, Homo sapiens
AFELTVSCQ

SEQ ID NO: 125064 - protein, 9 aa, Homo sapiens
FELTVSCQG

SEQ ID NO: 125065 - protein, 9 aa, Homo sapiens
ELTVSCQGG

SEQ ID NO: 125066 - protein, 9 aa, Homo sapiens
LTVSCQGGL

SEQ ID NO: 125067 - protein, 9 aa, Homo sapiens
TVSCQGGLP

SEQ ID NO: 125068 - protein, 9 aa, Homo sapiens
VSCQGGLPK

SEQ ID NO: 125069 - protein, 9 aa, Homo sapiens
SCQGGLPKE

SEQ ID NO: 125070 - protein, 9 aa, Homo sapiens
CQGGLPKEA

SEQ ID NO: 125071 - protein, 9 aa, Homo sapiens
QGGLPKEAC

SEQ ID NO: 125072 - protein, 9 aa, Homo sapiens
GGLPKEACM

SEQ ID NO: 125073 - protein, 9 aa, Homo sapiens
GLPKEACME

SEQ ID NO: 125074 - protein, 9 aa, Homo sapiens
LPKEACMEI

SEQ ID NO: 125075 - protein, 9 aa, Homo sapiens
PKEACMEIS

SEQ ID NO: 125076 - protein, 9 aa, Homo sapiens
KEACMEISS

SEQ ID NO: 125077 - protein, 9 aa, Homo sapiens
EACMEISSP

SEQ ID NO: 125078 - protein, 9 aa, Homo sapiens
ACMEISSPG

SEQ ID NO: 125079 - protein, 9 aa, Homo sapiens
CMEISSPGC

SEQ ID NO: 125080 - protein, 9 aa, Homo sapiens
MEISSPGCQ

SEQ ID NO: 125081 - protein, 9 aa, Homo sapiens
EISSPGCQP

SEQ ID NO: 125082 - protein, 9 aa, Homo sapiens
ISSPGCQPP

SEQ ID NO: 125083 - protein, 9 aa, Homo sapiens
SSPGCQPPA

SEQ ID NO: 125084 - protein, 9 aa, Homo sapiens
SPGCQPPAQ

SEQ ID NO: 125085 - protein, 9 aa, Homo sapiens
PGCQPPAQR

SEQ ID NO: 125086 - protein, 9 aa, Homo sapiens
GCQPPAQRL

SEQ ID NO: 125087 - protein, 9 aa, Homo sapiens
CQPPAQRLC

SEQ ID NO: 125088 - protein, 9 aa, Homo sapiens
QPPAQRLCQ

SEQ ID NO: 125089 - protein, 9 aa, Homo sapiens
PPAQRLCQP

SEQ ID NO: 125090 - protein, 9 aa, Homo sapiens
PAQRLCQPV

SEQ ID NO: 125091 - protein, 9 aa, Homo sapiens
AQRLCQPVL

SEQ ID NO: 125092 - protein, 9 aa, Homo sapiens
QRLCQPVLP

SEQ ID NO: 125093 - protein, 9 aa, Homo sapiens
RLCQPVLPS

SEQ ID NO: 125094 - protein, 9 aa, Homo sapiens
LCQPVLPSP

SEQ ID NO: 125095 - protein, 9 aa, Homo sapiens
CQPVLPSPA

SEQ ID NO: 125096 - protein, 9 aa, Homo sapiens
QPVLPSPAC

SEQ ID NO: 125097 - protein, 9 aa, Homo sapiens
PVLPSPACQ

SEQ ID NO: 125098 - protein, 9 aa, Homo sapiens
VLPSPACQL

SEQ ID NO: 125099 - protein, 9 aa, Homo sapiens
LPSPACQLV

SEQ ID NO: 125100 - protein, 9 aa, Homo sapiens
PSPACQLVL

SEQ ID NO: 125101 - protein, 9 aa, Homo sapiens
SPACQLVLH

SEQ ID NO: 125102 - protein, 9 aa, Homo sapiens
PACQLVLHQ

SEQ ID NO: 125103 - protein, 9 aa, Homo sapiens
ACQLVLHQI

SEQ ID NO: 125104 - protein, 9 aa, Homo sapiens
CQLVLHQIL

SEQ ID NO: 125105 - protein, 9 aa, Homo sapiens
QLVLHQILK

SEQ ID NO: 125106 - protein, 9 aa, Homo sapiens
LVLHQILKG

SEQ ID NO: 125107 - protein, 9 aa, Homo sapiens
VLHQILKGG

SEQ ID NO: 125108 - protein, 9 aa, Homo sapiens
LHQILKGGS

SEQ ID NO: 125109 - protein, 9 aa, Homo sapiens
HQILKGGSG

SEQ ID NO: 125110 - protein, 9 aa, Homo sapiens
QILKGGSGT

SEQ ID NO: 125111 - protein, 9 aa, Homo sapiens
ILKGGSGTY

SEQ ID NO: 125112 - protein, 9 aa, Homo sapiens
LKGGSGTYC

SEQ ID NO: 125113 - protein, 9 aa, Homo sapiens
KGGSGTYCL

SEQ ID NO: 125114 - protein, 9 aa, Homo sapiens
GGSGTYCLN

SEQ ID NO: 125115 - protein, 9 aa, Homo sapiens
GSGTYCLNV

SEQ ID NO: 125116 - protein, 9 aa, Homo sapiens
SGTYCLNVS

SEQ ID NO: 125117 - protein, 9 aa, Homo sapiens
GTYCLNVSL

SEQ ID NO: 125118 - protein, 9 aa, Homo sapiens
TYCLNVSLA

SEQ ID NO: 125119 - protein, 9 aa, Homo sapiens
YCLNVSLAD

SEQ ID NO: 125120 - protein, 9 aa, Homo sapiens
CLNVSLADT

SEQ ID NO: 125121 - protein, 9 aa, Homo sapiens
LNVSLADTN

SEQ ID NO: 125122 - protein, 9 aa, Homo sapiens
NVSLADTNS

SEQ ID NO: 125123 - protein, 9 aa, Homo sapiens
VSLADTNSL

SEQ ID NO: 125124 - protein, 9 aa, Homo sapiens
SLADTNSLA

SEQ ID NO: 125125 - protein, 9 aa, Homo sapiens
LADTNSLAV

SEQ ID NO: 125126 - protein, 9 aa, Homo sapiens
ADTNSLAVV

SEQ ID NO: 125127 - protein, 9 aa, Homo sapiens
DTNSLAVVS

SEQ ID NO: 125128 - protein, 9 aa, Homo sapiens
TNSLAVVST

SEQ ID NO: 125129 - protein, 9 aa, Homo sapiens
NSLAVVSTQ

SEQ ID NO: 125130 - protein, 9 aa, Homo sapiens
SLAVVSTQL

SEQ ID NO: 125131 - protein, 9 aa, Homo sapiens
LAVVSTQLI

SEQ ID NO: 125132 - protein, 9 aa, Homo sapiens
AVVSTQLIM

SEQ ID NO: 125133 - protein, 9 aa, Homo sapiens
VVSTQLIMP

SEQ ID NO: 125134 - protein, 9 aa, Homo sapiens
VSTQLIMPG

SEQ ID NO: 125135 - protein, 9 aa, Homo sapiens
STQLIMPGQ

SEQ ID NO: 125136 - protein, 9 aa, Homo sapiens
TQLIMPGQE

SEQ ID NO: 125137 - protein, 9 aa, Homo sapiens
QLIMPGQEA

SEQ ID NO: 125138 - protein, 9 aa, Homo sapiens
LIMPGQEAG

SEQ ID NO: 125139 - protein, 9 aa, Homo sapiens
IMPGQEAGL

SEQ ID NO: 125140 - protein, 9 aa, Homo sapiens
MPGQEAGLG

SEQ ID NO: 125141 - protein, 9 aa, Homo sapiens
PGQEAGLGQ

SEQ ID NO: 125142 - protein, 9 aa, Homo sapiens
GQEAGLGQV

SEQ ID NO: 125143 - protein, 9 aa, Homo sapiens
QEAGLGQVP

SEQ ID NO: 125144 - protein, 9 aa, Homo sapiens
EAGLGQVPL

SEQ ID NO: 125145 - protein, 9 aa, Homo sapiens
AGLGQVPLI

SEQ ID NO: 125146 - protein, 9 aa, Homo sapiens
GLGQVPLIV

SEQ ID NO: 125147 - protein, 9 aa, Homo sapiens
LGQVPLIVG

SEQ ID NO: 125148 - protein, 9 aa, Homo sapiens
GQVPLIVGI

SEQ ID NO: 125149 - protein, 9 aa, Homo sapiens
QVPLIVGIL

SEQ ID NO: 125150 - protein, 9 aa, Homo sapiens
VPLIVGILL

SEQ ID NO: 125151 - protein, 9 aa, Homo sapiens
PLIVGILLV

SEQ ID NO: 125152 - protein, 9 aa, Homo sapiens
LIVGILLVL

SEQ ID NO: 125153 - protein, 9 aa, Homo sapiens
IVGILLVLM

SEQ ID NO: 125154 - protein, 9 aa, Homo sapiens
VGILLVLMA

SEQ ID NO: 125155 - protein, 9 aa, Homo sapiens
GILLVLMAV

SEQ ID NO: 125156 - protein, 9 aa, Homo sapiens
ILLVLMAVV

SEQ ID NO: 125157 - protein, 9 aa, Homo sapiens
LLVLMAVVL

SEQ ID NO: 125158 - protein, 9 aa, Homo sapiens
LVLMAVVLA

SEQ ID NO: 125159 - protein, 9 aa, Homo sapiens
VLMAVVLAS

SEQ ID NO: 125160 - protein, 9 aa, Homo sapiens
LMAVVLASL

SEQ ID NO: 125161 - protein, 9 aa, Homo sapiens
MAVVLASLI

SEQ ID NO: 125162 - protein, 9 aa, Homo sapiens
AVVLASLIY

SEQ ID NO: 125163 - protein, 9 aa, Homo sapiens
VVLASLIYR

SEQ ID NO: 125164 - protein, 9 aa, Homo sapiens
VLASLIYRR

SEQ ID NO: 125165 - protein, 9 aa, Homo sapiens
LASLIYRRR

SEQ ID NO: 125166 - protein, 9 aa, Homo sapiens
ASLIYRRRL

SEQ ID NO: 125167 - protein, 9 aa, Homo sapiens
SLIYRRRLM

SEQ ID NO: 125168 - protein, 9 aa, Homo sapiens
LIYRRRLMK

SEQ ID NO: 125169 - protein, 9 aa, Homo sapiens
IYRRRLMKQ

SEQ ID NO: 125170 - protein, 9 aa, Homo sapiens
YRRRLMKQD

SEQ ID NO: 125171 - protein, 9 aa, Homo sapiens
RRRLMKQDF

SEQ ID NO: 125172 - protein, 9 aa, Homo sapiens
RRLMKQDFS

SEQ ID NO: 125173 - protein, 9 aa, Homo sapiens
RLMKQDFSV

SEQ ID NO: 125174 - protein, 9 aa, Homo sapiens
LMKQDFSVP

SEQ ID NO: 125175 - protein, 9 aa, Homo sapiens
MKQDFSVPQ

SEQ ID NO: 125176 - protein, 9 aa, Homo sapiens
KQDFSVPQL

SEQ ID NO: 125177 - protein, 9 aa, Homo sapiens
QDFSVPQLP

SEQ ID NO: 125178 - protein, 9 aa, Homo sapiens
DFSVPQLPH

SEQ ID NO: 125179 - protein, 9 aa, Homo sapiens
FSVPQLPHS

SEQ ID NO: 125180 - protein, 9 aa, Homo sapiens
SVPQLPHSS

SEQ ID NO: 125181 - protein, 9 aa, Homo sapiens
VPQLPHSSS

SEQ ID NO: 125182 - protein, 9 aa, Homo sapiens
PQLPHSSSH

SEQ ID NO: 125183 - protein, 9 aa, Homo sapiens
QLPHSSSHW

SEQ ID NO: 125184 - protein, 9 aa, Homo sapiens
LPHSSSHWL

SEQ ID NO: 125185 - protein, 9 aa, Homo sapiens
PHSSSHWLR

SEQ ID NO: 125186 - protein, 9 aa, Homo sapiens
HSSSHWLRL

SEQ ID NO: 125187 - protein, 9 aa, Homo sapiens
SSSHWLRLP

SEQ ID NO: 125188 - protein, 9 aa, Homo sapiens
SSHWLRLPR

SEQ ID NO: 125189 - protein, 9 aa, Homo sapiens
SHWLRLPRI

SEQ ID NO: 125190 - protein, 9 aa, Homo sapiens
HWLRLPRIF

SEQ ID NO: 125191 - protein, 9 aa, Homo sapiens
WLRLPRIFC

SEQ ID NO: 125192 - protein, 9 aa, Homo sapiens
LRLPRIFCS

SEQ ID NO: 125193 - protein, 9 aa, Homo sapiens
RLPRIFCSC

SEQ ID NO: 125194 - protein, 9 aa, Homo sapiens
LPRIFCSCP

SEQ ID NO: 125195 - protein, 9 aa, Homo sapiens
PRIFCSCPI

SEQ ID NO: 125196 - protein, 9 aa, Homo sapiens
RIFCSCPIG

SEQ ID NO: 125197 - protein, 9 aa, Homo sapiens
IFCSCPIGE

SEQ ID NO: 125198 - protein, 9 aa, Homo sapiens
FCSCPIGEN

SEQ ID NO: 125199 - protein, 9 aa, Homo sapiens
CSCPIGENS

SEQ ID NO: 125200 - protein, 9 aa, Homo sapiens
SCPIGENSP

SEQ ID NO: 125201 - protein, 9 aa, Homo sapiens
CPIGENSPL

SEQ ID NO: 125202 - protein, 9 aa, Homo sapiens
PIGENSPLL

SEQ ID NO: 125203 - protein, 9 aa, Homo sapiens
IGENSPLLS

SEQ ID NO: 125204 - protein, 9 aa, Homo sapiens
GENSPLLSG

SEQ ID NO: 125205 - protein, 9 aa, Homo sapiens
ENSPLLSGQ

SEQ ID NO: 125206 - protein, 9 aa, Homo sapiens
NSPLLSGQQ

SEQ ID NO: 125207 - protein, 9 aa, Homo sapiens
SPLLSGQQV

SEQ ID NO: 125208 - protein, 9 aa, Homo sapiens
MEMFQGLLL

SEQ ID NO: 125209 - protein, 9 aa, Homo sapiens
EMFQGLLLL

SEQ ID NO: 125210 - protein, 9 aa, Homo sapiens
MFQGLLLLL

SEQ ID NO: 125211 - protein, 9 aa, Homo sapiens
FQGLLLLLL

SEQ ID NO: 125212 - protein, 9 aa, Homo sapiens
QGLLLLLLL

SEQ ID NO: 125213 - protein, 9 aa, Homo sapiens
GLLLLLLLS

SEQ ID NO: 125214 - protein, 9 aa, Homo sapiens
LLLLLLLSM

SEQ ID NO: 125215 - protein, 9 aa, Homo sapiens
LLLLLLSMG

SEQ ID NO: 125216 - protein, 9 aa, Homo sapiens
LLLLLSMGG

SEQ ID NO: 125217 - protein, 9 aa, Homo sapiens
LLLLSMGGT

SEQ ID NO: 125218 - protein, 9 aa, Homo sapiens
LLLSMGGTW

SEQ ID NO: 125219 - protein, 9 aa, Homo sapiens
LLSMGGTWA

SEQ ID NO: 125220 - protein, 9 aa, Homo sapiens
LSMGGTWAS

SEQ ID NO: 125221 - protein, 9 aa, Homo sapiens
SMGGTWASK

SEQ ID NO: 125222 - protein, 9 aa, Homo sapiens
MGGTWASKE

SEQ ID NO: 125223 - protein, 9 aa, Homo sapiens
GGTWASKEP

SEQ ID NO: 125224 - protein, 9 aa, Homo sapiens
GTWASKEPL

SEQ ID NO: 125225 - protein, 9 aa, Homo sapiens
TWASKEPLR

SEQ ID NO: 125226 - protein, 9 aa, Homo sapiens
WASKEPLRP

SEQ ID NO: 125227 - protein, 9 aa, Homo sapiens
ASKEPLRPR

SEQ ID NO: 125228 - protein, 9 aa, Homo sapiens
SKEPLRPRC

SEQ ID NO: 125229 - protein, 9 aa, Homo sapiens
KEPLRPRCR

SEQ ID NO: 125230 - protein, 9 aa, Homo sapiens
EPLRPRCRP

SEQ ID NO: 125231 - protein, 9 aa, Homo sapiens
PLRPRCRPI

SEQ ID NO: 125232 - protein, 9 aa, Homo sapiens
LRPRCRPIN

SEQ ID NO: 125233 - protein, 9 aa, Homo sapiens
RPRCRPINA

SEQ ID NO: 125234 - protein, 9 aa, Homo sapiens
PRCRPINAT

SEQ ID NO: 125235 - protein, 9 aa, Homo sapiens
RCRPINATL

SEQ ID NO: 125236 - protein, 9 aa, Homo sapiens
CRPINATLA

SEQ ID NO: 125237 - protein, 9 aa, Homo sapiens
RPINATLAV

SEQ ID NO: 125238 - protein, 9 aa, Homo sapiens
PINATLAVE

SEQ ID NO: 125239 - protein, 9 aa, Homo sapiens
INATLAVEK

SEQ ID NO: 125240 - protein, 9 aa, Homo sapiens
NATLAVEKE

SEQ ID NO: 125241 - protein, 9 aa, Homo sapiens
ATLAVEKEG

SEQ ID NO: 125242 - protein, 9 aa, Homo sapiens
TLAVEKEGC

SEQ ID NO: 125243 - protein, 9 aa, Homo sapiens
LAVEKEGCP

SEQ ID NO: 125244 - protein, 9 aa, Homo sapiens
AVEKEGCPV

SEQ ID NO: 125245 - protein, 9 aa, Homo sapiens
VEKEGCPVC

SEQ ID NO: 125246 - protein, 9 aa, Homo sapiens
EKEGCPVCI

SEQ ID NO: 125247 - protein, 9 aa, Homo sapiens
KEGCPVCIT

SEQ ID NO: 125248 - protein, 9 aa, Homo sapiens
EGCPVCITV

SEQ ID NO: 125249 - protein, 9 aa, Homo sapiens
GCPVCITVN

SEQ ID NO: 125250 - protein, 9 aa, Homo sapiens
CPVCITVNT

SEQ ID NO: 125251 - protein, 9 aa, Homo sapiens
PVCITVNTT

SEQ ID NO: 125252 - protein, 9 aa, Homo sapiens
VCITVNTTI

SEQ ID NO: 125253 - protein, 9 aa, Homo sapiens
CITVNTTIC

SEQ ID NO: 125254 - protein, 9 aa, Homo sapiens
ITVNTTICA

SEQ ID NO: 125255 - protein, 9 aa, Homo sapiens
TVNTTICAG

SEQ ID NO: 125256 - protein, 9 aa, Homo sapiens
VNTTICAGY

SEQ ID NO: 125257 - protein, 9 aa, Homo sapiens
NTTICAGYC

SEQ ID NO: 125258 - protein, 9 aa, Homo sapiens
TTICAGYCP

SEQ ID NO: 125259 - protein, 9 aa, Homo sapiens
TICAGYCPT

SEQ ID NO: 125260 - protein, 9 aa, Homo sapiens
ICAGYCPTM

SEQ ID NO: 125261 - protein, 9 aa, Homo sapiens
CAGYCPTMT

SEQ ID NO: 125262 - protein, 9 aa, Homo sapiens
AGYCPTMTR

SEQ ID NO: 125263 - protein, 9 aa, Homo sapiens
GYCPTMTRV

SEQ ID NO: 125264 - protein, 9 aa, Homo sapiens
YCPTMTRVL

SEQ ID NO: 125265 - protein, 9 aa, Homo sapiens
CPTMTRVLQ

SEQ ID NO: 125266 - protein, 9 aa, Homo sapiens
PTMTRVLQG

SEQ ID NO: 125267 - protein, 9 aa, Homo sapiens
TMTRVLQGV

SEQ ID NO: 125268 - protein, 9 aa, Homo sapiens
MTRVLQGVL

SEQ ID NO: 125269 - protein, 9 aa, Homo sapiens
TRVLQGVLP

SEQ ID NO: 125270 - protein, 9 aa, Homo sapiens
RVLQGVLPA

SEQ ID NO: 125271 - protein, 9 aa, Homo sapiens
VLQGVLPAL

SEQ ID NO: 125272 - protein, 9 aa, Homo sapiens
LQGVLPALP

SEQ ID NO: 125273 - protein, 9 aa, Homo sapiens
QGVLPALPQ

SEQ ID NO: 125274 - protein, 9 aa, Homo sapiens
GVLPALPQV

SEQ ID NO: 125275 - protein, 9 aa, Homo sapiens
VLPALPQVV

SEQ ID NO: 125276 - protein, 9 aa, Homo sapiens
LPALPQVVC

SEQ ID NO: 125277 - protein, 9 aa, Homo sapiens
PALPQVVCN

SEQ ID NO: 125278 - protein, 9 aa, Homo sapiens
ALPQVVCNY

SEQ ID NO: 125279 - protein, 9 aa, Homo sapiens
LPQVVCNYR

SEQ ID NO: 125280 - protein, 9 aa, Homo sapiens
PQVVCNYRD

SEQ ID NO: 125281 - protein, 9 aa, Homo sapiens
QVVCNYRDV

SEQ ID NO: 125282 - protein, 9 aa, Homo sapiens
VVCNYRDVR

SEQ ID NO: 125283 - protein, 9 aa, Homo sapiens
VCNYRDVRF

SEQ ID NO: 125284 - protein, 9 aa, Homo sapiens
CNYRDVRFE

SEQ ID NO: 125285 - protein, 9 aa, Homo sapiens
NYRDVRFES

SEQ ID NO: 125286 - protein, 9 aa, Homo sapiens
YRDVRFESI

SEQ ID NO: 125287 - protein, 9 aa, Homo sapiens
RDVRFESIR

SEQ ID NO: 125288 - protein, 9 aa, Homo sapiens
DVRFESIRL

SEQ ID NO: 125289 - protein, 9 aa, Homo sapiens
VRFESIRLP

SEQ ID NO: 125290 - protein, 9 aa, Homo sapiens
RFESIRLPG

SEQ ID NO: 125291 - protein, 9 aa, Homo sapiens
FESIRLPGC

SEQ ID NO: 125292 - protein, 9 aa, Homo sapiens
ESIRLPGCP

SEQ ID NO: 125293 - protein, 9 aa, Homo sapiens
SIRLPGCPR

SEQ ID NO: 125294 - protein, 9 aa, Homo sapiens
IRLPGCPRG

SEQ ID NO: 125295 - protein, 9 aa, Homo sapiens
RLPGCPRGV

SEQ ID NO: 125296 - protein, 9 aa, Homo sapiens
LPGCPRGVN

SEQ ID NO: 125297 - protein, 9 aa, Homo sapiens
PGCPRGVNP

SEQ ID NO: 125298 - protein, 9 aa, Homo sapiens
GCPRGVNPV

SEQ ID NO: 125299 - protein, 9 aa, Homo sapiens
CPRGVNPVV

SEQ ID NO: 125300 - protein, 9 aa, Homo sapiens
PRGVNPVVS

SEQ ID NO: 125301 - protein, 9 aa, Homo sapiens
RGVNPVVSY

SEQ ID NO: 125302 - protein, 9 aa, Homo sapiens
GVNPVVSYA

SEQ ID NO: 125303 - protein, 9 aa, Homo sapiens
VNPVVSYAV

SEQ ID NO: 125304 - protein, 9 aa, Homo sapiens
NPVVSYAVA

SEQ ID NO: 125305 - protein, 9 aa, Homo sapiens
PVVSYAVAL

SEQ ID NO: 125306 - protein, 9 aa, Homo sapiens
VVSYAVALS

SEQ ID NO: 125307 - protein, 9 aa, Homo sapiens
VSYAVALSC

SEQ ID NO: 125308 - protein, 9 aa, Homo sapiens
SYAVALSCQ

SEQ ID NO: 125309 - protein, 9 aa, Homo sapiens
YAVALSCQC

SEQ ID NO: 125310 - protein, 9 aa, Homo sapiens
AVALSCQCA

SEQ ID NO: 125311 - protein, 9 aa, Homo sapiens
VALSCQCAL

SEQ ID NO: 125312 - protein, 9 aa, Homo sapiens
ALSCQCALC

SEQ ID NO: 125313 - protein, 9 aa, Homo sapiens
LSCQCALCR

SEQ ID NO: 125314 - protein, 9 aa, Homo sapiens
SCQCALCRR

SEQ ID NO: 125315 - protein, 9 aa, Homo sapiens
CQCALCRRS

SEQ ID NO: 125316 - protein, 9 aa, Homo sapiens
QCALCRRST

SEQ ID NO: 125317 - protein, 9 aa, Homo sapiens
CALCRRSTT

SEQ ID NO: 125318 - protein, 9 aa, Homo sapiens
ALCRRSTTD

SEQ ID NO: 125319 - protein, 9 aa, Homo sapiens
LCRRSTTDC

SEQ ID NO: 125320 - protein, 9 aa, Homo sapiens
CRRSTTDCG

SEQ ID NO: 125321 - protein, 9 aa, Homo sapiens
RRSTTDCGG

SEQ ID NO: 125322 - protein, 9 aa, Homo sapiens
RSTTDCGGP

SEQ ID NO: 125323 - protein, 9 aa, Homo sapiens
STTDCGGPK

SEQ ID NO: 125324 - protein, 9 aa, Homo sapiens
TTDCGGPKD

SEQ ID NO: 125325 - protein, 9 aa, Homo sapiens
TDCGGPKDH

SEQ ID NO: 125326 - protein, 9 aa, Homo sapiens
DCGGPKDHP

SEQ ID NO: 125327 - protein, 9 aa, Homo sapiens
CGGPKDHPL

SEQ ID NO: 125328 - protein, 9 aa, Homo sapiens
GGPKDHPLT

SEQ ID NO: 125329 - protein, 9 aa, Homo sapiens
GPKDHPLTC

SEQ ID NO: 125330 - protein, 9 aa, Homo sapiens
PKDHPLTCD

SEQ ID NO: 125331 - protein, 9 aa, Homo sapiens
KDHPLTCDD

SEQ ID NO: 125332 - protein, 9 aa, Homo sapiens
DHPLTCDDP

SEQ ID NO: 125333 - protein, 9 aa, Homo sapiens
HPLTCDDPR

SEQ ID NO: 125334 - protein, 9 aa, Homo sapiens
PLTCDDPRF

SEQ ID NO: 125335 - protein, 9 aa, Homo sapiens
LTCDDPRFQ

SEQ ID NO: 125336 - protein, 9 aa, Homo sapiens
TCDDPRFQD

SEQ ID NO: 125337 - protein, 9 aa, Homo sapiens
CDDPRFQDS

SEQ ID NO: 125338 - protein, 9 aa, Homo sapiens
DDPRFQDSS

SEQ ID NO: 125339 - protein, 9 aa, Homo sapiens
DPRFQDSSS

SEQ ID NO: 125340 - protein, 9 aa, Homo sapiens
PRFQDSSSS

SEQ ID NO: 125341 - protein, 9 aa, Homo sapiens
RFQDSSSSK

SEQ ID NO: 125342 - protein, 9 aa, Homo sapiens
FQDSSSSKA

SEQ ID NO: 125343 - protein, 9 aa, Homo sapiens
QDSSSSKAP

SEQ ID NO: 125344 - protein, 9 aa, Homo sapiens
DSSSSKAPP

SEQ ID NO: 125345 - protein, 9 aa, Homo sapiens
SSSSKAPPP

SEQ ID NO: 125346 - protein, 9 aa, Homo sapiens
SSSKAPPPS

SEQ ID NO: 125347 - protein, 9 aa, Homo sapiens
SSKAPPPSL

SEQ ID NO: 125348 - protein, 9 aa, Homo sapiens
SKAPPPSLP

SEQ ID NO: 125349 - protein, 9 aa, Homo sapiens
KAPPPSLPS

SEQ ID NO: 125350 - protein, 9 aa, Homo sapiens
APPPSLPSP

SEQ ID NO: 125351 - protein, 9 aa, Homo sapiens
PPPSLPSPS

SEQ ID NO: 125352 - protein, 9 aa, Homo sapiens
PPSLPSPSR

SEQ ID NO: 125353 - protein, 9 aa, Homo sapiens
PSLPSPSRL

SEQ ID NO: 125354 - protein, 9 aa, Homo sapiens
SLPSPSRLP

SEQ ID NO: 125355 - protein, 9 aa, Homo sapiens
LPSPSRLPG

SEQ ID NO: 125356 - protein, 9 aa, Homo sapiens
PSPSRLPGP

SEQ ID NO: 125357 - protein, 9 aa, Homo sapiens
SPSRLPGPS

SEQ ID NO: 125358 - protein, 9 aa, Homo sapiens
PSRLPGPSD

SEQ ID NO: 125359 - protein, 9 aa, Homo sapiens
SRLPGPSDT

SEQ ID NO: 125360 - protein, 9 aa, Homo sapiens
RLPGPSDTP

SEQ ID NO: 125361 - protein, 9 aa, Homo sapiens
LPGPSDTPI

SEQ ID NO: 125362 - protein, 9 aa, Homo sapiens
PGPSDTPIL

SEQ ID NO: 125363 - protein, 9 aa, Homo sapiens
GPSDTPILP

SEQ ID NO: 125364 - protein, 9 aa, Homo sapiens
PSDTPILPQ

SEQ ID NO: 125365 - protein, 9 aa, Homo sapiens
MSVVGIDLG

SEQ ID NO: 125366 - protein, 9 aa, Homo sapiens
SVVGIDLGF

SEQ ID NO: 125367 - protein, 9 aa, Homo sapiens
VVGIDLGFQ

SEQ ID NO: 125368 - protein, 9 aa, Homo sapiens
VGIDLGFQS

SEQ ID NO: 125369 - protein, 9 aa, Homo sapiens
GIDLGFQSC

SEQ ID NO: 125370 - protein, 9 aa, Homo sapiens
IDLGFQSCY

SEQ ID NO: 125371 - protein, 9 aa, Homo sapiens
DLGFQSCYV

SEQ ID NO: 125372 - protein, 9 aa, Homo sapiens
LGFQSCYVA

SEQ ID NO: 125373 - protein, 9 aa, Homo sapiens
GFQSCYVAV

SEQ ID NO: 125374 - protein, 9 aa, Homo sapiens
FQSCYVAVA

SEQ ID NO: 125375 - protein, 9 aa, Homo sapiens
QSCYVAVAR

SEQ ID NO: 125376 - protein, 9 aa, Homo sapiens
SCYVAVARA

SEQ ID NO: 125377 - protein, 9 aa, Homo sapiens
CYVAVARAG

SEQ ID NO: 125378 - protein, 9 aa, Homo sapiens
YVAVARAGG

SEQ ID NO: 125379 - protein, 9 aa, Homo sapiens
VAVARAGGI

SEQ ID NO: 125380 - protein, 9 aa, Homo sapiens
AVARAGGIE

SEQ ID NO: 125381 - protein, 9 aa, Homo sapiens
VARAGGIET

SEQ ID NO: 125382 - protein, 9 aa, Homo sapiens
ARAGGIETI

SEQ ID NO: 125383 - protein, 9 aa, Homo sapiens
RAGGIETIA

SEQ ID NO: 125384 - protein, 9 aa, Homo sapiens
AGGIETIAN

SEQ ID NO: 125385 - protein, 9 aa, Homo sapiens
GGIETIANE

SEQ ID NO: 125386 - protein, 9 aa, Homo sapiens
GIETIANEY

SEQ ID NO: 125387 - protein, 9 aa, Homo sapiens
IETIANEYS

SEQ ID NO: 125388 - protein, 9 aa, Homo sapiens
ETIANEYSD

SEQ ID NO: 125389 - protein, 9 aa, Homo sapiens
TIANEYSDR

SEQ ID NO: 125390 - protein, 9 aa, Homo sapiens
IANEYSDRC

SEQ ID NO: 125391 - protein, 9 aa, Homo sapiens
ANEYSDRCT

SEQ ID NO: 125392 - protein, 9 aa, Homo sapiens
NEYSDRCTP

SEQ ID NO: 125393 - protein, 9 aa, Homo sapiens
EYSDRCTPA

SEQ ID NO: 125394 - protein, 9 aa, Homo sapiens
YSDRCTPAC

SEQ ID NO: 125395 - protein, 9 aa, Homo sapiens
SDRCTPACI

SEQ ID NO: 125396 - protein, 9 aa, Homo sapiens
DRCTPACIS

SEQ ID NO: 125397 - protein, 9 aa, Homo sapiens
RCTPACISF

SEQ ID NO: 125398 - protein, 9 aa, Homo sapiens
CTPACISFG

SEQ ID NO: 125399 - protein, 9 aa, Homo sapiens
TPACISFGP

SEQ ID NO: 125400 - protein, 9 aa, Homo sapiens
PACISFGPK

SEQ ID NO: 125401 - protein, 9 aa, Homo sapiens
ACISFGPKN

SEQ ID NO: 125402 - protein, 9 aa, Homo sapiens
CISFGPKNR

SEQ ID NO: 125403 - protein, 9 aa, Homo sapiens
ISFGPKNRS

SEQ ID NO: 125404 - protein, 9 aa, Homo sapiens
SFGPKNRSI

SEQ ID NO: 125405 - protein, 9 aa, Homo sapiens
FGPKNRSIG

SEQ ID NO: 125406 - protein, 9 aa, Homo sapiens
GPKNRSIGA

SEQ ID NO: 125407 - protein, 9 aa, Homo sapiens
PKNRSIGAA

SEQ ID NO: 125408 - protein, 9 aa, Homo sapiens
KNRSIGAAA

SEQ ID NO: 125409 - protein, 9 aa, Homo sapiens
NRSIGAAAK

SEQ ID NO: 125410 - protein, 9 aa, Homo sapiens
RSIGAAAKS

SEQ ID NO: 125411 - protein, 9 aa, Homo sapiens
SIGAAAKSQ

SEQ ID NO: 125412 - protein, 9 aa, Homo sapiens
IGAAAKSQV

SEQ ID NO: 125413 - protein, 9 aa, Homo sapiens
GAAAKSQVI

SEQ ID NO: 125414 - protein, 9 aa, Homo sapiens
AAAKSQVIS

SEQ ID NO: 125415 - protein, 9 aa, Homo sapiens
AAKSQVISN

SEQ ID NO: 125416 - protein, 9 aa, Homo sapiens
AKSQVISNA

SEQ ID NO: 125417 - protein, 9 aa, Homo sapiens
KSQVISNAK

SEQ ID NO: 125418 - protein, 9 aa, Homo sapiens
SQVISNAKN

SEQ ID NO: 125419 - protein, 9 aa, Homo sapiens
QVISNAKNT

SEQ ID NO: 125420 - protein, 9 aa, Homo sapiens
VISNAKNTV

SEQ ID NO: 125421 - protein, 9 aa, Homo sapiens
ISNAKNTVQ

SEQ ID NO: 125422 - protein, 9 aa, Homo sapiens
SNAKNTVQG

SEQ ID NO: 125423 - protein, 9 aa, Homo sapiens
NAKNTVQGF

SEQ ID NO: 125424 - protein, 9 aa, Homo sapiens
AKNTVQGFK

SEQ ID NO: 125425 - protein, 9 aa, Homo sapiens
KNTVQGFKR

SEQ ID NO: 125426 - protein, 9 aa, Homo sapiens
NTVQGFKRF

SEQ ID NO: 125427 - protein, 9 aa, Homo sapiens
TVQGFKRFH

SEQ ID NO: 125428 - protein, 9 aa, Homo sapiens
VQGFKRFHG

SEQ ID NO: 125429 - protein, 9 aa, Homo sapiens
QGFKRFHGR

SEQ ID NO: 125430 - protein, 9 aa, Homo sapiens
GFKRFHGRA

SEQ ID NO: 125431 - protein, 9 aa, Homo sapiens
FKRFHGRAF

SEQ ID NO: 125432 - protein, 9 aa, Homo sapiens
KRFHGRAFS

SEQ ID NO: 125433 - protein, 9 aa, Homo sapiens
RFHGRAFSD

SEQ ID NO: 125434 - protein, 9 aa, Homo sapiens
FHGRAFSDP

SEQ ID NO: 125435 - protein, 9 aa, Homo sapiens
HGRAFSDPF

SEQ ID NO: 125436 - protein, 9 aa, Homo sapiens
GRAFSDPFV

SEQ ID NO: 125437 - protein, 9 aa, Homo sapiens
RAFSDPFVE

SEQ ID NO: 125438 - protein, 9 aa, Homo sapiens
AFSDPFVEA

SEQ ID NO: 125439 - protein, 9 aa, Homo sapiens
FSDPFVEAE

SEQ ID NO: 125440 - protein, 9 aa, Homo sapiens
SDPFVEAEK

SEQ ID NO: 125441 - protein, 9 aa, Homo sapiens
DPFVEAEKS

SEQ ID NO: 125442 - protein, 9 aa, Homo sapiens
PFVEAEKSN

SEQ ID NO: 125443 - protein, 9 aa, Homo sapiens
FVEAEKSNL

SEQ ID NO: 125444 - protein, 9 aa, Homo sapiens
VEAEKSNLA

SEQ ID NO: 125445 - protein, 9 aa, Homo sapiens
EAEKSNLAY

SEQ ID NO: 125446 - protein, 9 aa, Homo sapiens
AEKSNLAYD

SEQ ID NO: 125447 - protein, 9 aa, Homo sapiens
EKSNLAYDI

SEQ ID NO: 125448 - protein, 9 aa, Homo sapiens
KSNLAYDIV

SEQ ID NO: 125449 - protein, 9 aa, Homo sapiens
SNLAYDIVQ

SEQ ID NO: 125450 - protein, 9 aa, Homo sapiens
NLAYDIVQL

SEQ ID NO: 125451 - protein, 9 aa, Homo sapiens
LAYDIVQLP

SEQ ID NO: 125452 - protein, 9 aa, Homo sapiens
AYDIVQLPT

SEQ ID NO: 125453 - protein, 9 aa, Homo sapiens
YDIVQLPTG

SEQ ID NO: 125454 - protein, 9 aa, Homo sapiens
DIVQLPTGL

SEQ ID NO: 125455 - protein, 9 aa, Homo sapiens
IVQLPTGLT

SEQ ID NO: 125456 - protein, 9 aa, Homo sapiens
VQLPTGLTG

SEQ ID NO: 125457 - protein, 9 aa, Homo sapiens
QLPTGLTGI

SEQ ID NO: 125458 - protein, 9 aa, Homo sapiens
LPTGLTGIK

SEQ ID NO: 125459 - protein, 9 aa, Homo sapiens
PTGLTGIKV

SEQ ID NO: 125460 - protein, 9 aa, Homo sapiens
TGLTGIKVT

SEQ ID NO: 125461 - protein, 9 aa, Homo sapiens
GLTGIKVTY

SEQ ID NO: 125462 - protein, 9 aa, Homo sapiens
LTGIKVTYM

SEQ ID NO: 125463 - protein, 9 aa, Homo sapiens
TGIKVTYME

SEQ ID NO: 125464 - protein, 9 aa, Homo sapiens
GIKVTYMEE

SEQ ID NO: 125465 - protein, 9 aa, Homo sapiens
IKVTYMEEE

SEQ ID NO: 125466 - protein, 9 aa, Homo sapiens
KVTYMEEER

SEQ ID NO: 125467 - protein, 9 aa, Homo sapiens
VTYMEEERN

SEQ ID NO: 125468 - protein, 9 aa, Homo sapiens
TYMEEERNF

SEQ ID NO: 125469 - protein, 9 aa, Homo sapiens
YMEEERNFT

SEQ ID NO: 125470 - protein, 9 aa, Homo sapiens
MEEERNFTT

SEQ ID NO: 125471 - protein, 9 aa, Homo sapiens
EEERNFTTE

SEQ ID NO: 125472 - protein, 9 aa, Homo sapiens
EERNFTTEQ

SEQ ID NO: 125473 - protein, 9 aa, Homo sapiens
ERNFTTEQV

SEQ ID NO: 125474 - protein, 9 aa, Homo sapiens
RNFTTEQVT

SEQ ID NO: 125475 - protein, 9 aa, Homo sapiens
NFTTEQVTA

SEQ ID NO: 125476 - protein, 9 aa, Homo sapiens
FTTEQVTAM

SEQ ID NO: 125477 - protein, 9 aa, Homo sapiens
TTEQVTAML

SEQ ID NO: 125478 - protein, 9 aa, Homo sapiens
TEQVTAMLL

SEQ ID NO: 125479 - protein, 9 aa, Homo sapiens
EQVTAMLLS

SEQ ID NO: 125480 - protein, 9 aa, Homo sapiens
QVTAMLLSK

SEQ ID NO: 125481 - protein, 9 aa, Homo sapiens
VTAMLLSKL

SEQ ID NO: 125482 - protein, 9 aa, Homo sapiens
TAMLLSKLK

SEQ ID NO: 125483 - protein, 9 aa, Homo sapiens
AMLLSKLKE

SEQ ID NO: 125484 - protein, 9 aa, Homo sapiens
MLLSKLKET

SEQ ID NO: 125485 - protein, 9 aa, Homo sapiens
LLSKLKETA

SEQ ID NO: 125486 - protein, 9 aa, Homo sapiens
LSKLKETAE

SEQ ID NO: 125487 - protein, 9 aa, Homo sapiens
SKLKETAES

SEQ ID NO: 125488 - protein, 9 aa, Homo sapiens
KLKETAESV

SEQ ID NO: 125489 - protein, 9 aa, Homo sapiens
LKETAESVL

SEQ ID NO: 125490 - protein, 9 aa, Homo sapiens
KETAESVLK

SEQ ID NO: 125491 - protein, 9 aa, Homo sapiens
ETAESVLKK

SEQ ID NO: 125492 - protein, 9 aa, Homo sapiens
TAESVLKKP

SEQ ID NO: 125493 - protein, 9 aa, Homo sapiens
AESVLKKPV

SEQ ID NO: 125494 - protein, 9 aa, Homo sapiens
ESVLKKPVV

SEQ ID NO: 125495 - protein, 9 aa, Homo sapiens
SVLKKPVVD

SEQ ID NO: 125496 - protein, 9 aa, Homo sapiens
VLKKPVVDC

SEQ ID NO: 125497 - protein, 9 aa, Homo sapiens
LKKPVVDCV

SEQ ID NO: 125498 - protein, 9 aa, Homo sapiens
KKPVVDCVV

SEQ ID NO: 125499 - protein, 9 aa, Homo sapiens
KPVVDCVVS

SEQ ID NO: 125500 - protein, 9 aa, Homo sapiens
PVVDCVVSV

SEQ ID NO: 125501 - protein, 9 aa, Homo sapiens
VVDCVVSVP

SEQ ID NO: 125502 - protein, 9 aa, Homo sapiens
VDCVVSVPC

SEQ ID NO: 125503 - protein, 9 aa, Homo sapiens
DCVVSVPCF

SEQ ID NO: 125504 - protein, 9 aa, Homo sapiens
CVVSVPCFY

SEQ ID NO: 125505 - protein, 9 aa, Homo sapiens
VVSVPCFYT

SEQ ID NO: 125506 - protein, 9 aa, Homo sapiens
VSVPCFYTD

SEQ ID NO: 125507 - protein, 9 aa, Homo sapiens
SVPCFYTDA

SEQ ID NO: 125508 - protein, 9 aa, Homo sapiens
VPCFYTDAE

SEQ ID NO: 125509 - protein, 9 aa, Homo sapiens
PCFYTDAER

SEQ ID NO: 125510 - protein, 9 aa, Homo sapiens
CFYTDAERR

SEQ ID NO: 125511 - protein, 9 aa, Homo sapiens
FYTDAERRS

SEQ ID NO: 125512 - protein, 9 aa, Homo sapiens
YTDAERRSV

SEQ ID NO: 125513 - protein, 9 aa, Homo sapiens
TDAERRSVM

SEQ ID NO: 125514 - protein, 9 aa, Homo sapiens
DAERRSVMD

SEQ ID NO: 125515 - protein, 9 aa, Homo sapiens
AERRSVMDA

SEQ ID NO: 125516 - protein, 9 aa, Homo sapiens
ERRSVMDAT

SEQ ID NO: 125517 - protein, 9 aa, Homo sapiens
RRSVMDATQ

SEQ ID NO: 125518 - protein, 9 aa, Homo sapiens
RSVMDATQI

SEQ ID NO: 125519 - protein, 9 aa, Homo sapiens
SVMDATQIA

SEQ ID NO: 125520 - protein, 9 aa, Homo sapiens
VMDATQIAG

SEQ ID NO: 125521 - protein, 9 aa, Homo sapiens
MDATQIAGL

SEQ ID NO: 125522 - protein, 9 aa, Homo sapiens
DATQIAGLN

SEQ ID NO: 125523 - protein, 9 aa, Homo sapiens
ATQIAGLNC

SEQ ID NO: 125524 - protein, 9 aa, Homo sapiens
TQIAGLNCL

SEQ ID NO: 125525 - protein, 9 aa, Homo sapiens
QIAGLNCLR

SEQ ID NO: 125526 - protein, 9 aa, Homo sapiens
IAGLNCLRL

SEQ ID NO: 125527 - protein, 9 aa, Homo sapiens
AGLNCLRLM

SEQ ID NO: 125528 - protein, 9 aa, Homo sapiens
GLNCLRLMN

SEQ ID NO: 125529 - protein, 9 aa, Homo sapiens
LNCLRLMNE

SEQ ID NO: 125530 - protein, 9 aa, Homo sapiens
NCLRLMNET

SEQ ID NO: 125531 - protein, 9 aa, Homo sapiens
CLRLMNETT

SEQ ID NO: 125532 - protein, 9 aa, Homo sapiens
LRLMNETTA

SEQ ID NO: 125533 - protein, 9 aa, Homo sapiens
RLMNETTAV

SEQ ID NO: 125534 - protein, 9 aa, Homo sapiens
LMNETTAVA

SEQ ID NO: 125535 - protein, 9 aa, Homo sapiens
MNETTAVAL

SEQ ID NO: 125536 - protein, 9 aa, Homo sapiens
NETTAVALA

SEQ ID NO: 125537 - protein, 9 aa, Homo sapiens
ETTAVALAY

SEQ ID NO: 125538 - protein, 9 aa, Homo sapiens
TTAVALAYG

SEQ ID NO: 125539 - protein, 9 aa, Homo sapiens
TAVALAYGI

SEQ ID NO: 125540 - protein, 9 aa, Homo sapiens
AVALAYGIY

SEQ ID NO: 125541 - protein, 9 aa, Homo sapiens
VALAYGIYK

SEQ ID NO: 125542 - protein, 9 aa, Homo sapiens
ALAYGIYKQ

SEQ ID NO: 125543 - protein, 9 aa, Homo sapiens
LAYGIYKQD

SEQ ID NO: 125544 - protein, 9 aa, Homo sapiens
AYGIYKQDL

SEQ ID NO: 125545 - protein, 9 aa, Homo sapiens
YGIYKQDLP

SEQ ID NO: 125546 - protein, 9 aa, Homo sapiens
GIYKQDLPA

SEQ ID NO: 125547 - protein, 9 aa, Homo sapiens
IYKQDLPAL

SEQ ID NO: 125548 - protein, 9 aa, Homo sapiens
YKQDLPALE

SEQ ID NO: 125549 - protein, 9 aa, Homo sapiens
KQDLPALEE

SEQ ID NO: 125550 - protein, 9 aa, Homo sapiens
QDLPALEEK

SEQ ID NO: 125551 - protein, 9 aa, Homo sapiens
DLPALEEKP

SEQ ID NO: 125552 - protein, 9 aa, Homo sapiens
LPALEEKPR

SEQ ID NO: 125553 - protein, 9 aa, Homo sapiens
PALEEKPRN

SEQ ID NO: 125554 - protein, 9 aa, Homo sapiens
ALEEKPRNV

SEQ ID NO: 125555 - protein, 9 aa, Homo sapiens
LEEKPRNVV

SEQ ID NO: 125556 - protein, 9 aa, Homo sapiens
EEKPRNVVF

SEQ ID NO: 125557 - protein, 9 aa, Homo sapiens
EKPRNVVFV

SEQ ID NO: 125558 - protein, 9 aa, Homo sapiens
KPRNVVFVD

SEQ ID NO: 125559 - protein, 9 aa, Homo sapiens
PRNVVFVDM

SEQ ID NO: 125560 - protein, 9 aa, Homo sapiens
RNVVFVDMG

SEQ ID NO: 125561 - protein, 9 aa, Homo sapiens
NVVFVDMGH

SEQ ID NO: 125562 - protein, 9 aa, Homo sapiens
VVFVDMGHS

SEQ ID NO: 125563 - protein, 9 aa, Homo sapiens
VFVDMGHSA

SEQ ID NO: 125564 - protein, 9 aa, Homo sapiens
FVDMGHSAY

SEQ ID NO: 125565 - protein, 9 aa, Homo sapiens
VDMGHSAYQ

SEQ ID NO: 125566 - protein, 9 aa, Homo sapiens
DMGHSAYQV

SEQ ID NO: 125567 - protein, 9 aa, Homo sapiens
MGHSAYQVS

SEQ ID NO: 125568 - protein, 9 aa, Homo sapiens
GHSAYQVSV

SEQ ID NO: 125569 - protein, 9 aa, Homo sapiens
HSAYQVSVC

SEQ ID NO: 125570 - protein, 9 aa, Homo sapiens
SAYQVSVCA

SEQ ID NO: 125571 - protein, 9 aa, Homo sapiens
AYQVSVCAF

SEQ ID NO: 125572 - protein, 9 aa, Homo sapiens
YQVSVCAFN

SEQ ID NO: 125573 - protein, 9 aa, Homo sapiens
QVSVCAFNR

SEQ ID NO: 125574 - protein, 9 aa, Homo sapiens
VSVCAFNRG

SEQ ID NO: 125575 - protein, 9 aa, Homo sapiens
SVCAFNRGK

SEQ ID NO: 125576 - protein, 9 aa, Homo sapiens
VCAFNRGKL

SEQ ID NO: 125577 - protein, 9 aa, Homo sapiens
CAFNRGKLK

SEQ ID NO: 125578 - protein, 9 aa, Homo sapiens
AFNRGKLKV

SEQ ID NO: 125579 - protein, 9 aa, Homo sapiens
FNRGKLKVL

SEQ ID NO: 125580 - protein, 9 aa, Homo sapiens
NRGKLKVLA

SEQ ID NO: 125581 - protein, 9 aa, Homo sapiens
RGKLKVLAT

SEQ ID NO: 125582 - protein, 9 aa, Homo sapiens
GKLKVLATA

SEQ ID NO: 125583 - protein, 9 aa, Homo sapiens
KLKVLATAF

SEQ ID NO: 125584 - protein, 9 aa, Homo sapiens
LKVLATAFD

SEQ ID NO: 125585 - protein, 9 aa, Homo sapiens
KVLATAFDT

SEQ ID NO: 125586 - protein, 9 aa, Homo sapiens
VLATAFDTT

SEQ ID NO: 125587 - protein, 9 aa, Homo sapiens
LATAFDTTL

SEQ ID NO: 125588 - protein, 9 aa, Homo sapiens
ATAFDTTLG

SEQ ID NO: 125589 - protein, 9 aa, Homo sapiens
TAFDTTLGG

SEQ ID NO: 125590 - protein, 9 aa, Homo sapiens
AFDTTLGGR

SEQ ID NO: 125591 - protein, 9 aa, Homo sapiens
FDTTLGGRK

SEQ ID NO: 125592 - protein, 9 aa, Homo sapiens
DTTLGGRKF

SEQ ID NO: 125593 - protein, 9 aa, Homo sapiens
TTLGGRKFD

SEQ ID NO: 125594 - protein, 9 aa, Homo sapiens
TLGGRKFDE

SEQ ID NO: 125595 - protein, 9 aa, Homo sapiens
LGGRKFDEV

SEQ ID NO: 125596 - protein, 9 aa, Homo sapiens
GGRKFDEVL

SEQ ID NO: 125597 - protein, 9 aa, Homo sapiens
GRKFDEVLV

SEQ ID NO: 125598 - protein, 9 aa, Homo sapiens
RKFDEVLVN

SEQ ID NO: 125599 - protein, 9 aa, Homo sapiens
KFDEVLVNH

SEQ ID NO: 125600 - protein, 9 aa, Homo sapiens
FDEVLVNHF

SEQ ID NO: 125601 - protein, 9 aa, Homo sapiens
DEVLVNHFC

SEQ ID NO: 125602 - protein, 9 aa, Homo sapiens
EVLVNHFCE

SEQ ID NO: 125603 - protein, 9 aa, Homo sapiens
VLVNHFCEE

SEQ ID NO: 125604 - protein, 9 aa, Homo sapiens
LVNHFCEEF

SEQ ID NO: 125605 - protein, 9 aa, Homo sapiens
VNHFCEEFG

SEQ ID NO: 125606 - protein, 9 aa, Homo sapiens
NHFCEEFGK

SEQ ID NO: 125607 - protein, 9 aa, Homo sapiens
HFCEEFGKK

SEQ ID NO: 125608 - protein, 9 aa, Homo sapiens
FCEEFGKKY

SEQ ID NO: 125609 - protein, 9 aa, Homo sapiens
CEEFGKKYK

SEQ ID NO: 125610 - protein, 9 aa, Homo sapiens
EEFGKKYKL

SEQ ID NO: 125611 - protein, 9 aa, Homo sapiens
EFGKKYKLD

SEQ ID NO: 125612 - protein, 9 aa, Homo sapiens
FGKKYKLDI

SEQ ID NO: 125613 - protein, 9 aa, Homo sapiens
GKKYKLDIK

SEQ ID NO: 125614 - protein, 9 aa, Homo sapiens
KKYKLDIKS

SEQ ID NO: 125615 - protein, 9 aa, Homo sapiens
KYKLDIKSK

SEQ ID NO: 125616 - protein, 9 aa, Homo sapiens
YKLDIKSKI

SEQ ID NO: 125617 - protein, 9 aa, Homo sapiens
KLDIKSKIR

SEQ ID NO: 125618 - protein, 9 aa, Homo sapiens
LDIKSKIRA

SEQ ID NO: 125619 - protein, 9 aa, Homo sapiens
DIKSKIRAL

SEQ ID NO: 125620 - protein, 9 aa, Homo sapiens
IKSKIRALL

SEQ ID NO: 125621 - protein, 9 aa, Homo sapiens
KSKIRALLR

SEQ ID NO: 125622 - protein, 9 aa, Homo sapiens
SKIRALLRL

SEQ ID NO: 125623 - protein, 9 aa, Homo sapiens
KIRALLRLS

SEQ ID NO: 125624 - protein, 9 aa, Homo sapiens
IRALLRLSQ

SEQ ID NO: 125625 - protein, 9 aa, Homo sapiens
RALLRLSQE

SEQ ID NO: 125626 - protein, 9 aa, Homo sapiens
ALLRLSQEC

SEQ ID NO: 125627 - protein, 9 aa, Homo sapiens
LLRLSQECE

SEQ ID NO: 125628 - protein, 9 aa, Homo sapiens
LRLSQECEK

SEQ ID NO: 125629 - protein, 9 aa, Homo sapiens
RLSQECEKL

SEQ ID NO: 125630 - protein, 9 aa, Homo sapiens
LSQECEKLK

SEQ ID NO: 125631 - protein, 9 aa, Homo sapiens
SQECEKLKK

SEQ ID NO: 125632 - protein, 9 aa, Homo sapiens
QECEKLKKL

SEQ ID NO: 125633 - protein, 9 aa, Homo sapiens
ECEKLKKLM

SEQ ID NO: 125634 - protein, 9 aa, Homo sapiens
CEKLKKLMS

SEQ ID NO: 125635 - protein, 9 aa, Homo sapiens
EKLKKLMSA

SEQ ID NO: 125636 - protein, 9 aa, Homo sapiens
KLKKLMSAN

SEQ ID NO: 125637 - protein, 9 aa, Homo sapiens
LKKLMSANA

SEQ ID NO: 125638 - protein, 9 aa, Homo sapiens
KKLMSANAS

SEQ ID NO: 125639 - protein, 9 aa, Homo sapiens
KLMSANASD

SEQ ID NO: 125640 - protein, 9 aa, Homo sapiens
LMSANASDL

SEQ ID NO: 125641 - protein, 9 aa, Homo sapiens
MSANASDLP

SEQ ID NO: 125642 - protein, 9 aa, Homo sapiens
SANASDLPL

SEQ ID NO: 125643 - protein, 9 aa, Homo sapiens
ANASDLPLS

SEQ ID NO: 125644 - protein, 9 aa, Homo sapiens
NASDLPLSI

SEQ ID NO: 125645 - protein, 9 aa, Homo sapiens
ASDLPLSIE

SEQ ID NO: 125646 - protein, 9 aa, Homo sapiens
SDLPLSIEC

SEQ ID NO: 125647 - protein, 9 aa, Homo sapiens
DLPLSIECF

SEQ ID NO: 125648 - protein, 9 aa, Homo sapiens
LPLSIECFM

SEQ ID NO: 125649 - protein, 9 aa, Homo sapiens
PLSIECFMN

SEQ ID NO: 125650 - protein, 9 aa, Homo sapiens
LSIECFMND

SEQ ID NO: 125651 - protein, 9 aa, Homo sapiens
SIECFMNDV

SEQ ID NO: 125652 - protein, 9 aa, Homo sapiens
IECFMNDVD

SEQ ID NO: 125653 - protein, 9 aa, Homo sapiens
ECFMNDVDV

SEQ ID NO: 125654 - protein, 9 aa, Homo sapiens
CFMNDVDVS

SEQ ID NO: 125655 - protein, 9 aa, Homo sapiens
FMNDVDVSG

SEQ ID NO: 125656 - protein, 9 aa, Homo sapiens
MNDVDVSGT

SEQ ID NO: 125657 - protein, 9 aa, Homo sapiens
NDVDVSGTM

SEQ ID NO: 125658 - protein, 9 aa, Homo sapiens
DVDVSGTMN

SEQ ID NO: 125659 - protein, 9 aa, Homo sapiens
VDVSGTMNR

SEQ ID NO: 125660 - protein, 9 aa, Homo sapiens
DVSGTMNRG

SEQ ID NO: 125661 - protein, 9 aa, Homo sapiens
VSGTMNRGK

SEQ ID NO: 125662 - protein, 9 aa, Homo sapiens
SGTMNRGKF

SEQ ID NO: 125663 - protein, 9 aa, Homo sapiens
GTMNRGKFL

SEQ ID NO: 125664 - protein, 9 aa, Homo sapiens
TMNRGKFLE

SEQ ID NO: 125665 - protein, 9 aa, Homo sapiens
MNRGKFLEM

SEQ ID NO: 125666 - protein, 9 aa, Homo sapiens
NRGKFLEMC

SEQ ID NO: 125667 - protein, 9 aa, Homo sapiens
RGKFLEMCN

SEQ ID NO: 125668 - protein, 9 aa, Homo sapiens
GKFLEMCND

SEQ ID NO: 125669 - protein, 9 aa, Homo sapiens
KFLEMCNDL

SEQ ID NO: 125670 - protein, 9 aa, Homo sapiens
FLEMCNDLL

SEQ ID NO: 125671 - protein, 9 aa, Homo sapiens
LEMCNDLLA

SEQ ID NO: 125672 - protein, 9 aa, Homo sapiens
EMCNDLLAR

SEQ ID NO: 125673 - protein, 9 aa, Homo sapiens
MCNDLLARV

SEQ ID NO: 125674 - protein, 9 aa, Homo sapiens
CNDLLARVE

SEQ ID NO: 125675 - protein, 9 aa, Homo sapiens
NDLLARVEP

SEQ ID NO: 125676 - protein, 9 aa, Homo sapiens
DLLARVEPP

SEQ ID NO: 125677 - protein, 9 aa, Homo sapiens
LLARVEPPL

SEQ ID NO: 125678 - protein, 9 aa, Homo sapiens
LARVEPPLR

SEQ ID NO: 125679 - protein, 9 aa, Homo sapiens
ARVEPPLRS

SEQ ID NO: 125680 - protein, 9 aa, Homo sapiens
RVEPPLRSV

SEQ ID NO: 125681 - protein, 9 aa, Homo sapiens
VEPPLRSVL

SEQ ID NO: 125682 - protein, 9 aa, Homo sapiens
EPPLRSVLE

SEQ ID NO: 125683 - protein, 9 aa, Homo sapiens
PPLRSVLEQ

SEQ ID NO: 125684 - protein, 9 aa, Homo sapiens
PLRSVLEQT

SEQ ID NO: 125685 - protein, 9 aa, Homo sapiens
LRSVLEQTK

SEQ ID NO: 125686 - protein, 9 aa, Homo sapiens
RSVLEQTKL

SEQ ID NO: 125687 - protein, 9 aa, Homo sapiens
SVLEQTKLK

SEQ ID NO: 125688 - protein, 9 aa, Homo sapiens
VLEQTKLKK

SEQ ID NO: 125689 - protein, 9 aa, Homo sapiens
LEQTKLKKE

SEQ ID NO: 125690 - protein, 9 aa, Homo sapiens
EQTKLKKED

SEQ ID NO: 125691 - protein, 9 aa, Homo sapiens
QTKLKKEDI

SEQ ID NO: 125692 - protein, 9 aa, Homo sapiens
TKLKKEDIY

SEQ ID NO: 125693 - protein, 9 aa, Homo sapiens
KLKKEDIYA

SEQ ID NO: 125694 - protein, 9 aa, Homo sapiens
LKKEDIYAV

SEQ ID NO: 125695 - protein, 9 aa, Homo sapiens
KKEDIYAVE

SEQ ID NO: 125696 - protein, 9 aa, Homo sapiens
KEDIYAVEI

SEQ ID NO: 125697 - protein, 9 aa, Homo sapiens
EDIYAVEIV

SEQ ID NO: 125698 - protein, 9 aa, Homo sapiens
DIYAVEIVG

SEQ ID NO: 125699 - protein, 9 aa, Homo sapiens
IYAVEIVGG

SEQ ID NO: 125700 - protein, 9 aa, Homo sapiens
YAVEIVGGA

SEQ ID NO: 125701 - protein, 9 aa, Homo sapiens
AVEIVGGAT

SEQ ID NO: 125702 - protein, 9 aa, Homo sapiens
VEIVGGATR

SEQ ID NO: 125703 - protein, 9 aa, Homo sapiens
EIVGGATRI

SEQ ID NO: 125704 - protein, 9 aa, Homo sapiens
IVGGATRIP

SEQ ID NO: 125705 - protein, 9 aa, Homo sapiens
VGGATRIPA

SEQ ID NO: 125706 - protein, 9 aa, Homo sapiens
GGATRIPAV

SEQ ID NO: 125707 - protein, 9 aa, Homo sapiens
GATRIPAVK

SEQ ID NO: 125708 - protein, 9 aa, Homo sapiens
ATRIPAVKE

SEQ ID NO: 125709 - protein, 9 aa, Homo sapiens
TRIPAVKEK

SEQ ID NO: 125710 - protein, 9 aa, Homo sapiens
RIPAVKEKI

SEQ ID NO: 125711 - protein, 9 aa, Homo sapiens
IPAVKEKIS

SEQ ID NO: 125712 - protein, 9 aa, Homo sapiens
PAVKEKISK

SEQ ID NO: 125713 - protein, 9 aa, Homo sapiens
AVKEKISKF

SEQ ID NO: 125714 - protein, 9 aa, Homo sapiens
VKEKISKFF

SEQ ID NO: 125715 - protein, 9 aa, Homo sapiens
KEKISKFFG

SEQ ID NO: 125716 - protein, 9 aa, Homo sapiens
EKISKFFGK

SEQ ID NO: 125717 - protein, 9 aa, Homo sapiens
KISKFFGKE

SEQ ID NO: 125718 - protein, 9 aa, Homo sapiens
ISKFFGKEL

SEQ ID NO: 125719 - protein, 9 aa, Homo sapiens
SKFFGKELS

SEQ ID NO: 125720 - protein, 9 aa, Homo sapiens
KFFGKELST

SEQ ID NO: 125721 - protein, 9 aa, Homo sapiens
FFGKELSTT

SEQ ID NO: 125722 - protein, 9 aa, Homo sapiens
FGKELSTTL

SEQ ID NO: 125723 - protein, 9 aa, Homo sapiens
GKELSTTLN

SEQ ID NO: 125724 - protein, 9 aa, Homo sapiens
KELSTTLNA

SEQ ID NO: 125725 - protein, 9 aa, Homo sapiens
ELSTTLNAD

SEQ ID NO: 125726 - protein, 9 aa, Homo sapiens
LSTTLNADE

SEQ ID NO: 125727 - protein, 9 aa, Homo sapiens
STTLNADEA

SEQ ID NO: 125728 - protein, 9 aa, Homo sapiens
TTLNADEAV

SEQ ID NO: 125729 - protein, 9 aa, Homo sapiens
TLNADEAVT

SEQ ID NO: 125730 - protein, 9 aa, Homo sapiens
LNADEAVTR

SEQ ID NO: 125731 - protein, 9 aa, Homo sapiens
NADEAVTRG

SEQ ID NO: 125732 - protein, 9 aa, Homo sapiens
ADEAVTRGC

SEQ ID NO: 125733 - protein, 9 aa, Homo sapiens
DEAVTRGCA

SEQ ID NO: 125734 - protein, 9 aa, Homo sapiens
EAVTRGCAL

SEQ ID NO: 125735 - protein, 9 aa, Homo sapiens
AVTRGCALQ

SEQ ID NO: 125736 - protein, 9 aa, Homo sapiens
VTRGCALQC

SEQ ID NO: 125737 - protein, 9 aa, Homo sapiens
TRGCALQCA

SEQ ID NO: 125738 - protein, 9 aa, Homo sapiens
RGCALQCAI

SEQ ID NO: 125739 - protein, 9 aa, Homo sapiens
GCALQCAIL

SEQ ID NO: 125740 - protein, 9 aa, Homo sapiens
CALQCAILS

SEQ ID NO: 125741 - protein, 9 aa, Homo sapiens
ALQCAILSP

SEQ ID NO: 125742 - protein, 9 aa, Homo sapiens
LQCAILSPA

SEQ ID NO: 125743 - protein, 9 aa, Homo sapiens
QCAILSPAF

SEQ ID NO: 125744 - protein, 9 aa, Homo sapiens
CAILSPAFK

SEQ ID NO: 125745 - protein, 9 aa, Homo sapiens
AILSPAFKV

SEQ ID NO: 125746 - protein, 9 aa, Homo sapiens
ILSPAFKVR

SEQ ID NO: 125747 - protein, 9 aa, Homo sapiens
LSPAFKVRE

SEQ ID NO: 125748 - protein, 9 aa, Homo sapiens
SPAFKVREF

SEQ ID NO: 125749 - protein, 9 aa, Homo sapiens
PAFKVREFS

SEQ ID NO: 125750 - protein, 9 aa, Homo sapiens
AFKVREFSI

SEQ ID NO: 125751 - protein, 9 aa, Homo sapiens
FKVREFSIT

SEQ ID NO: 125752 - protein, 9 aa, Homo sapiens
KVREFSITD

SEQ ID NO: 125753 - protein, 9 aa, Homo sapiens
VREFSITDV

SEQ ID NO: 125754 - protein, 9 aa, Homo sapiens
REFSITDVV

SEQ ID NO: 125755 - protein, 9 aa, Homo sapiens
EFSITDVVP

SEQ ID NO: 125756 - protein, 9 aa, Homo sapiens
FSITDVVPY

SEQ ID NO: 125757 - protein, 9 aa, Homo sapiens
SITDVVPYP

SEQ ID NO: 125758 - protein, 9 aa, Homo sapiens
ITDVVPYPI

SEQ ID NO: 125759 - protein, 9 aa, Homo sapiens
TDVVPYPIS

SEQ ID NO: 125760 - protein, 9 aa, Homo sapiens
DVVPYPISL

SEQ ID NO: 125761 - protein, 9 aa, Homo sapiens
VVPYPISLR

SEQ ID NO: 125762 - protein, 9 aa, Homo sapiens
VPYPISLRW

SEQ ID NO: 125763 - protein, 9 aa, Homo sapiens
PYPISLRWN

SEQ ID NO: 125764 - protein, 9 aa, Homo sapiens
YPISLRWNS

SEQ ID NO: 125765 - protein, 9 aa, Homo sapiens
PISLRWNSP

SEQ ID NO: 125766 - protein, 9 aa, Homo sapiens
ISLRWNSPA

SEQ ID NO: 125767 - protein, 9 aa, Homo sapiens
SLRWNSPAE

SEQ ID NO: 125768 - protein, 9 aa, Homo sapiens
LRWNSPAEE

SEQ ID NO: 125769 - protein, 9 aa, Homo sapiens
RWNSPAEEG

SEQ ID NO: 125770 - protein, 9 aa, Homo sapiens
WNSPAEEGS

SEQ ID NO: 125771 - protein, 9 aa, Homo sapiens
NSPAEEGSS

SEQ ID NO: 125772 - protein, 9 aa, Homo sapiens
SPAEEGSSD

SEQ ID NO: 125773 - protein, 9 aa, Homo sapiens
PAEEGSSDC

SEQ ID NO: 125774 - protein, 9 aa, Homo sapiens
AEEGSSDCE

SEQ ID NO: 125775 - protein, 9 aa, Homo sapiens
EEGSSDCEV

SEQ ID NO: 125776 - protein, 9 aa, Homo sapiens
EGSSDCEVF

SEQ ID NO: 125777 - protein, 9 aa, Homo sapiens
GSSDCEVFS

SEQ ID NO: 125778 - protein, 9 aa, Homo sapiens
SSDCEVFSK

SEQ ID NO: 125779 - protein, 9 aa, Homo sapiens
SDCEVFSKN

SEQ ID NO: 125780 - protein, 9 aa, Homo sapiens
DCEVFSKNH

SEQ ID NO: 125781 - protein, 9 aa, Homo sapiens
CEVFSKNHA

SEQ ID NO: 125782 - protein, 9 aa, Homo sapiens
EVFSKNHAA

SEQ ID NO: 125783 - protein, 9 aa, Homo sapiens
VFSKNHAAP

SEQ ID NO: 125784 - protein, 9 aa, Homo sapiens
FSKNHAAPF

SEQ ID NO: 125785 - protein, 9 aa, Homo sapiens
SKNHAAPFS

SEQ ID NO: 125786 - protein, 9 aa, Homo sapiens
KNHAAPFSK

SEQ ID NO: 125787 - protein, 9 aa, Homo sapiens
NHAAPFSKV

SEQ ID NO: 125788 - protein, 9 aa, Homo sapiens
HAAPFSKVL

SEQ ID NO: 125789 - protein, 9 aa, Homo sapiens
AAPFSKVLT

SEQ ID NO: 125790 - protein, 9 aa, Homo sapiens
APFSKVLTF

SEQ ID NO: 125791 - protein, 9 aa, Homo sapiens
PFSKVLTFY

SEQ ID NO: 125792 - protein, 9 aa, Homo sapiens
FSKVLTFYR

SEQ ID NO: 125793 - protein, 9 aa, Homo sapiens
SKVLTFYRK

SEQ ID NO: 125794 - protein, 9 aa, Homo sapiens
KVLTFYRKE

SEQ ID NO: 125795 - protein, 9 aa, Homo sapiens
VLTFYRKEP

SEQ ID NO: 125796 - protein, 9 aa, Homo sapiens
LTFYRKEPF

SEQ ID NO: 125797 - protein, 9 aa, Homo sapiens
TFYRKEPFT

SEQ ID NO: 125798 - protein, 9 aa, Homo sapiens
FYRKEPFTL

SEQ ID NO: 125799 - protein, 9 aa, Homo sapiens
YRKEPFTLE

SEQ ID NO: 125800 - protein, 9 aa, Homo sapiens
RKEPFTLEA

SEQ ID NO: 125801 - protein, 9 aa, Homo sapiens
KEPFTLEAY

SEQ ID NO: 125802 - protein, 9 aa, Homo sapiens
EPFTLEAYY

SEQ ID NO: 125803 - protein, 9 aa, Homo sapiens
PFTLEAYYS

SEQ ID NO: 125804 - protein, 9 aa, Homo sapiens
FTLEAYYSS

SEQ ID NO: 125805 - protein, 9 aa, Homo sapiens
TLEAYYSSP

SEQ ID NO: 125806 - protein, 9 aa, Homo sapiens
LEAYYSSPQ

SEQ ID NO: 125807 - protein, 9 aa, Homo sapiens
EAYYSSPQD

SEQ ID NO: 125808 - protein, 9 aa, Homo sapiens
AYYSSPQDL

SEQ ID NO: 125809 - protein, 9 aa, Homo sapiens
YYSSPQDLP

SEQ ID NO: 125810 - protein, 9 aa, Homo sapiens
YSSPQDLPY

SEQ ID NO: 125811 - protein, 9 aa, Homo sapiens
SSPQDLPYP

SEQ ID NO: 125812 - protein, 9 aa, Homo sapiens
SPQDLPYPD

SEQ ID NO: 125813 - protein, 9 aa, Homo sapiens
PQDLPYPDP

SEQ ID NO: 125814 - protein, 9 aa, Homo sapiens
QDLPYPDPA

SEQ ID NO: 125815 - protein, 9 aa, Homo sapiens
DLPYPDPAI

SEQ ID NO: 125816 - protein, 9 aa, Homo sapiens
LPYPDPAIA

SEQ ID NO: 125817 - protein, 9 aa, Homo sapiens
PYPDPAIAQ

SEQ ID NO: 125818 - protein, 9 aa, Homo sapiens
YPDPAIAQF

SEQ ID NO: 125819 - protein, 9 aa, Homo sapiens
PDPAIAQFS

SEQ ID NO: 125820 - protein, 9 aa, Homo sapiens
DPAIAQFSV

SEQ ID NO: 125821 - protein, 9 aa, Homo sapiens
PAIAQFSVQ

SEQ ID NO: 125822 - protein, 9 aa, Homo sapiens
AIAQFSVQK

SEQ ID NO: 125823 - protein, 9 aa, Homo sapiens
IAQFSVQKV

SEQ ID NO: 125824 - protein, 9 aa, Homo sapiens
AQFSVQKVT

SEQ ID NO: 125825 - protein, 9 aa, Homo sapiens
QFSVQKVTP

SEQ ID NO: 125826 - protein, 9 aa, Homo sapiens
FSVQKVTPQ

SEQ ID NO: 125827 - protein, 9 aa, Homo sapiens
SVQKVTPQS

SEQ ID NO: 125828 - protein, 9 aa, Homo sapiens
VQKVTPQSD

SEQ ID NO: 125829 - protein, 9 aa, Homo sapiens
QKVTPQSDG

SEQ ID NO: 125830 - protein, 9 aa, Homo sapiens
KVTPQSDGS

SEQ ID NO: 125831 - protein, 9 aa, Homo sapiens
VTPQSDGSS

SEQ ID NO: 125832 - protein, 9 aa, Homo sapiens
TPQSDGSSS

SEQ ID NO: 125833 - protein, 9 aa, Homo sapiens
PQSDGSSSK

SEQ ID NO: 125834 - protein, 9 aa, Homo sapiens
QSDGSSSKV

SEQ ID NO: 125835 - protein, 9 aa, Homo sapiens
SDGSSSKVK

SEQ ID NO: 125836 - protein, 9 aa, Homo sapiens
DGSSSKVKV

SEQ ID NO: 125837 - protein, 9 aa, Homo sapiens
GSSSKVKVK

SEQ ID NO: 125838 - protein, 9 aa, Homo sapiens
SSSKVKVKV

SEQ ID NO: 125839 - protein, 9 aa, Homo sapiens
SSKVKVKVR

SEQ ID NO: 125840 - protein, 9 aa, Homo sapiens
SKVKVKVRV

SEQ ID NO: 125841 - protein, 9 aa, Homo sapiens
KVKVKVRVN

SEQ ID NO: 125842 - protein, 9 aa, Homo sapiens
VKVKVRVNV

SEQ ID NO: 125843 - protein, 9 aa, Homo sapiens
KVKVRVNVH

SEQ ID NO: 125844 - protein, 9 aa, Homo sapiens
VKVRVNVHG

SEQ ID NO: 125845 - protein, 9 aa, Homo sapiens
KVRVNVHGI

SEQ ID NO: 125846 - protein, 9 aa, Homo sapiens
VRVNVHGIF

SEQ ID NO: 125847 - protein, 9 aa, Homo sapiens
RVNVHGIFS

SEQ ID NO: 125848 - protein, 9 aa, Homo sapiens
VNVHGIFSV

SEQ ID NO: 125849 - protein, 9 aa, Homo sapiens
NVHGIFSVS

SEQ ID NO: 125850 - protein, 9 aa, Homo sapiens
VHGIFSVSS

SEQ ID NO: 125851 - protein, 9 aa, Homo sapiens
HGIFSVSSA

SEQ ID NO: 125852 - protein, 9 aa, Homo sapiens
GIFSVSSAS

SEQ ID NO: 125853 - protein, 9 aa, Homo sapiens
IFSVSSASL

SEQ ID NO: 125854 - protein, 9 aa, Homo sapiens
FSVSSASLV

SEQ ID NO: 125855 - protein, 9 aa, Homo sapiens
SVSSASLVE

SEQ ID NO: 125856 - protein, 9 aa, Homo sapiens
VSSASLVEV

SEQ ID NO: 125857 - protein, 9 aa, Homo sapiens
SSASLVEVH

SEQ ID NO: 125858 - protein, 9 aa, Homo sapiens
SASLVEVHK

SEQ ID NO: 125859 - protein, 9 aa, Homo sapiens
ASLVEVHKS

SEQ ID NO: 125860 - protein, 9 aa, Homo sapiens
SLVEVHKSE

SEQ ID NO: 125861 - protein, 9 aa, Homo sapiens
LVEVHKSEE

SEQ ID NO: 125862 - protein, 9 aa, Homo sapiens
VEVHKSEEN

SEQ ID NO: 125863 - protein, 9 aa, Homo sapiens
EVHKSEENE

SEQ ID NO: 125864 - protein, 9 aa, Homo sapiens
VHKSEENEE

SEQ ID NO: 125865 - protein, 9 aa, Homo sapiens
HKSEENEEP

SEQ ID NO: 125866 - protein, 9 aa, Homo sapiens
KSEENEEPM

SEQ ID NO: 125867 - protein, 9 aa, Homo sapiens
SEENEEPME

SEQ ID NO: 125868 - protein, 9 aa, Homo sapiens
EENEEPMET

SEQ ID NO: 125869 - protein, 9 aa, Homo sapiens
ENEEPMETD

SEQ ID NO: 125870 - protein, 9 aa, Homo sapiens
NEEPMETDQ

SEQ ID NO: 125871 - protein, 9 aa, Homo sapiens
EEPMETDQN

SEQ ID NO: 125872 - protein, 9 aa, Homo sapiens
EPMETDQNA

SEQ ID NO: 125873 - protein, 9 aa, Homo sapiens
PMETDQNAK

SEQ ID NO: 125874 - protein, 9 aa, Homo sapiens
METDQNAKE

SEQ ID NO: 125875 - protein, 9 aa, Homo sapiens
ETDQNAKEE

SEQ ID NO: 125876 - protein, 9 aa, Homo sapiens
TDQNAKEEE

SEQ ID NO: 125877 - protein, 9 aa, Homo sapiens
DQNAKEEEK

SEQ ID NO: 125878 - protein, 9 aa, Homo sapiens
QNAKEEEKM

SEQ ID NO: 125879 - protein, 9 aa, Homo sapiens
NAKEEEKMQ

SEQ ID NO: 125880 - protein, 9 aa, Homo sapiens
AKEEEKMQV

SEQ ID NO: 125881 - protein, 9 aa, Homo sapiens
KEEEKMQVD

SEQ ID NO: 125882 - protein, 9 aa, Homo sapiens
EEEKMQVDQ

SEQ ID NO: 125883 - protein, 9 aa, Homo sapiens
EEKMQVDQE

SEQ ID NO: 125884 - protein, 9 aa, Homo sapiens
EKMQVDQEE

SEQ ID NO: 125885 - protein, 9 aa, Homo sapiens
KMQVDQEEP

SEQ ID NO: 125886 - protein, 9 aa, Homo sapiens
MQVDQEEPH

SEQ ID NO: 125887 - protein, 9 aa, Homo sapiens
QVDQEEPHV

SEQ ID NO: 125888 - protein, 9 aa, Homo sapiens
VDQEEPHVE

SEQ ID NO: 125889 - protein, 9 aa, Homo sapiens
DQEEPHVEE

SEQ ID NO: 125890 - protein, 9 aa, Homo sapiens
QEEPHVEEQ

SEQ ID NO: 125891 - protein, 9 aa, Homo sapiens
EEPHVEEQQ

SEQ ID NO: 125892 - protein, 9 aa, Homo sapiens
EPHVEEQQQ

SEQ ID NO: 125893 - protein, 9 aa, Homo sapiens
PHVEEQQQQ

SEQ ID NO: 125894 - protein, 9 aa, Homo sapiens
HVEEQQQQT

SEQ ID NO: 125895 - protein, 9 aa, Homo sapiens
VEEQQQQTP

SEQ ID NO: 125896 - protein, 9 aa, Homo sapiens
EEQQQQTPA

SEQ ID NO: 125897 - protein, 9 aa, Homo sapiens
EQQQQTPAE

SEQ ID NO: 125898 - protein, 9 aa, Homo sapiens
QQQQTPAEN

SEQ ID NO: 125899 - protein, 9 aa, Homo sapiens
QQQTPAENK

SEQ ID NO: 125900 - protein, 9 aa, Homo sapiens
QQTPAENKA

SEQ ID NO: 125901 - protein, 9 aa, Homo sapiens
QTPAENKAE

SEQ ID NO: 125902 - protein, 9 aa, Homo sapiens
TPAENKAES

SEQ ID NO: 125903 - protein, 9 aa, Homo sapiens
PAENKAESE

SEQ ID NO: 125904 - protein, 9 aa, Homo sapiens
AENKAESEE

SEQ ID NO: 125905 - protein, 9 aa, Homo sapiens
ENKAESEEM

SEQ ID NO: 125906 - protein, 9 aa, Homo sapiens
NKAESEEME

SEQ ID NO: 125907 - protein, 9 aa, Homo sapiens
KAESEEMET

SEQ ID NO: 125908 - protein, 9 aa, Homo sapiens
AESEEMETS

SEQ ID NO: 125909 - protein, 9 aa, Homo sapiens
ESEEMETSQ

SEQ ID NO: 125910 - protein, 9 aa, Homo sapiens
SEEMETSQA

SEQ ID NO: 125911 - protein, 9 aa, Homo sapiens
EEMETSQAG

SEQ ID NO: 125912 - protein, 9 aa, Homo sapiens
EMETSQAGS

SEQ ID NO: 125913 - protein, 9 aa, Homo sapiens
METSQAGSK

SEQ ID NO: 125914 - protein, 9 aa, Homo sapiens
ETSQAGSKD

SEQ ID NO: 125915 - protein, 9 aa, Homo sapiens
TSQAGSKDK

SEQ ID NO: 125916 - protein, 9 aa, Homo sapiens
SQAGSKDKK

SEQ ID NO: 125917 - protein, 9 aa, Homo sapiens
QAGSKDKKM

SEQ ID NO: 125918 - protein, 9 aa, Homo sapiens
AGSKDKKMD

SEQ ID NO: 125919 - protein, 9 aa, Homo sapiens
GSKDKKMDQ

SEQ ID NO: 125920 - protein, 9 aa, Homo sapiens
SKDKKMDQP

SEQ ID NO: 125921 - protein, 9 aa, Homo sapiens
KDKKMDQPP

SEQ ID NO: 125922 - protein, 9 aa, Homo sapiens
DKKMDQPPQ

SEQ ID NO: 125923 - protein, 9 aa, Homo sapiens
KKMDQPPQA

SEQ ID NO: 125924 - protein, 9 aa, Homo sapiens
KMDQPPQAK

SEQ ID NO: 125925 - protein, 9 aa, Homo sapiens
MDQPPQAKK

SEQ ID NO: 125926 - protein, 9 aa, Homo sapiens
DQPPQAKKA

SEQ ID NO: 125927 - protein, 9 aa, Homo sapiens
QPPQAKKAK

SEQ ID NO: 125928 - protein, 9 aa, Homo sapiens
PPQAKKAKV

SEQ ID NO: 125929 - protein, 9 aa, Homo sapiens
PQAKKAKVK

SEQ ID NO: 125930 - protein, 9 aa, Homo sapiens
QAKKAKVKT

SEQ ID NO: 125931 - protein, 9 aa, Homo sapiens
AKKAKVKTS

SEQ ID NO: 125932 - protein, 9 aa, Homo sapiens
KKAKVKTST

SEQ ID NO: 125933 - protein, 9 aa, Homo sapiens
KAKVKTSTV

SEQ ID NO: 125934 - protein, 9 aa, Homo sapiens
AKVKTSTVD

SEQ ID NO: 125935 - protein, 9 aa, Homo sapiens
KVKTSTVDL

SEQ ID NO: 125936 - protein, 9 aa, Homo sapiens
VKTSTVDLP

SEQ ID NO: 125937 - protein, 9 aa, Homo sapiens
KTSTVDLPI

SEQ ID NO: 125938 - protein, 9 aa, Homo sapiens
TSTVDLPIE

SEQ ID NO: 125939 - protein, 9 aa, Homo sapiens
STVDLPIEN

SEQ ID NO: 125940 - protein, 9 aa, Homo sapiens
TVDLPIENQ

SEQ ID NO: 125941 - protein, 9 aa, Homo sapiens
VDLPIENQL

SEQ ID NO: 125942 - protein, 9 aa, Homo sapiens
DLPIENQLL

SEQ ID NO: 125943 - protein, 9 aa, Homo sapiens
LPIENQLLW

SEQ ID NO: 125944 - protein, 9 aa, Homo sapiens
PIENQLLWQ

SEQ ID NO: 125945 - protein, 9 aa, Homo sapiens
IENQLLWQI

SEQ ID NO: 125946 - protein, 9 aa, Homo sapiens
ENQLLWQID

SEQ ID NO: 125947 - protein, 9 aa, Homo sapiens
NQLLWQIDR

SEQ ID NO: 125948 - protein, 9 aa, Homo sapiens
QLLWQIDRE

SEQ ID NO: 125949 - protein, 9 aa, Homo sapiens
LLWQIDREM

SEQ ID NO: 125950 - protein, 9 aa, Homo sapiens
LWQIDREML

SEQ ID NO: 125951 - protein, 9 aa, Homo sapiens
WQIDREMLN

SEQ ID NO: 125952 - protein, 9 aa, Homo sapiens
QIDREMLNL

SEQ ID NO: 125953 - protein, 9 aa, Homo sapiens
IDREMLNLY

SEQ ID NO: 125954 - protein, 9 aa, Homo sapiens
DREMLNLYI

SEQ ID NO: 125955 - protein, 9 aa, Homo sapiens
REMLNLYIE

SEQ ID NO: 125956 - protein, 9 aa, Homo sapiens
EMLNLYIEN

SEQ ID NO: 125957 - protein, 9 aa, Homo sapiens
MLNLYIENE

SEQ ID NO: 125958 - protein, 9 aa, Homo sapiens
LNLYIENEG

SEQ ID NO: 125959 - protein, 9 aa, Homo sapiens
NLYIENEGK

SEQ ID NO: 125960 - protein, 9 aa, Homo sapiens
LYIENEGKM

SEQ ID NO: 125961 - protein, 9 aa, Homo sapiens
YIENEGKMI

SEQ ID NO: 125962 - protein, 9 aa, Homo sapiens
IENEGKMIM

SEQ ID NO: 125963 - protein, 9 aa, Homo sapiens
ENEGKMIMQ

SEQ ID NO: 125964 - protein, 9 aa, Homo sapiens
NEGKMIMQD

SEQ ID NO: 125965 - protein, 9 aa, Homo sapiens
EGKMIMQDK

SEQ ID NO: 125966 - protein, 9 aa, Homo sapiens
GKMIMQDKL

SEQ ID NO: 125967 - protein, 9 aa, Homo sapiens
KMIMQDKLE

SEQ ID NO: 125968 - protein, 9 aa, Homo sapiens
MIMQDKLEK

SEQ ID NO: 125969 - protein, 9 aa, Homo sapiens
IMQDKLEKE

SEQ ID NO: 125970 - protein, 9 aa, Homo sapiens
MQDKLEKER

SEQ ID NO: 125971 - protein, 9 aa, Homo sapiens
QDKLEKERN

SEQ ID NO: 125972 - protein, 9 aa, Homo sapiens
DKLEKERND

SEQ ID NO: 125973 - protein, 9 aa, Homo sapiens
KLEKERNDA

SEQ ID NO: 125974 - protein, 9 aa, Homo sapiens
LEKERNDAK

SEQ ID NO: 125975 - protein, 9 aa, Homo sapiens
EKERNDAKN

SEQ ID NO: 125976 - protein, 9 aa, Homo sapiens
KERNDAKNA

SEQ ID NO: 125977 - protein, 9 aa, Homo sapiens
ERNDAKNAV

SEQ ID NO: 125978 - protein, 9 aa, Homo sapiens
RNDAKNAVE

SEQ ID NO: 125979 - protein, 9 aa, Homo sapiens
NDAKNAVEE

SEQ ID NO: 125980 - protein, 9 aa, Homo sapiens
DAKNAVEEY

SEQ ID NO: 125981 - protein, 9 aa, Homo sapiens
AKNAVEEYV

SEQ ID NO: 125982 - protein, 9 aa, Homo sapiens
KNAVEEYVY

SEQ ID NO: 125983 - protein, 9 aa, Homo sapiens
NAVEEYVYE

SEQ ID NO: 125984 - protein, 9 aa, Homo sapiens
AVEEYVYEM

SEQ ID NO: 125985 - protein, 9 aa, Homo sapiens
VEEYVYEMR

SEQ ID NO: 125986 - protein, 9 aa, Homo sapiens
EEYVYEMRD

SEQ ID NO: 125987 - protein, 9 aa, Homo sapiens
EYVYEMRDK

SEQ ID NO: 125988 - protein, 9 aa, Homo sapiens
YVYEMRDKL

SEQ ID NO: 125989 - protein, 9 aa, Homo sapiens
VYEMRDKLS

SEQ ID NO: 125990 - protein, 9 aa, Homo sapiens
YEMRDKLSG

SEQ ID NO: 125991 - protein, 9 aa, Homo sapiens
EMRDKLSGE

SEQ ID NO: 125992 - protein, 9 aa, Homo sapiens
MRDKLSGEY

SEQ ID NO: 125993 - protein, 9 aa, Homo sapiens
RDKLSGEYE

SEQ ID NO: 125994 - protein, 9 aa, Homo sapiens
DKLSGEYEK

SEQ ID NO: 125995 - protein, 9 aa, Homo sapiens
KLSGEYEKF

SEQ ID NO: 125996 - protein, 9 aa, Homo sapiens
LSGEYEKFV

SEQ ID NO: 125997 - protein, 9 aa, Homo sapiens
SGEYEKFVS

SEQ ID NO: 125998 - protein, 9 aa, Homo sapiens
GEYEKFVSE

SEQ ID NO: 125999 - protein, 9 aa, Homo sapiens
EYEKFVSED

SEQ ID NO: 126000 - protein, 9 aa, Homo sapiens
YEKFVSEDD

SEQ ID NO: 126001 - protein, 9 aa, Homo sapiens
EKFVSEDDR

SEQ ID NO: 126002 - protein, 9 aa, Homo sapiens
KFVSEDDRN

SEQ ID NO: 126003 - protein, 9 aa, Homo sapiens
FVSEDDRNS

SEQ ID NO: 126004 - protein, 9 aa, Homo sapiens
VSEDDRNSF

SEQ ID NO: 126005 - protein, 9 aa, Homo sapiens
SEDDRNSFT

SEQ ID NO: 126006 - protein, 9 aa, Homo sapiens
EDDRNSFTL

SEQ ID NO: 126007 - protein, 9 aa, Homo sapiens
DDRNSFTLK

SEQ ID NO: 126008 - protein, 9 aa, Homo sapiens
DRNSFTLKL

SEQ ID NO: 126009 - protein, 9 aa, Homo sapiens
RNSFTLKLE

SEQ ID NO: 126010 - protein, 9 aa, Homo sapiens
NSFTLKLED

SEQ ID NO: 126011 - protein, 9 aa, Homo sapiens
SFTLKLEDT

SEQ ID NO: 126012 - protein, 9 aa, Homo sapiens
FTLKLEDTE

SEQ ID NO: 126013 - protein, 9 aa, Homo sapiens
TLKLEDTEN

SEQ ID NO: 126014 - protein, 9 aa, Homo sapiens
LKLEDTENW

SEQ ID NO: 126015 - protein, 9 aa, Homo sapiens
KLEDTENWL

SEQ ID NO: 126016 - protein, 9 aa, Homo sapiens
LEDTENWLY

SEQ ID NO: 126017 - protein, 9 aa, Homo sapiens
EDTENWLYE

SEQ ID NO: 126018 - protein, 9 aa, Homo sapiens
DTENWLYED

SEQ ID NO: 126019 - protein, 9 aa, Homo sapiens
TENWLYEDG

SEQ ID NO: 126020 - protein, 9 aa, Homo sapiens
ENWLYEDGE

SEQ ID NO: 126021 - protein, 9 aa, Homo sapiens
NWLYEDGED

SEQ ID NO: 126022 - protein, 9 aa, Homo sapiens
WLYEDGEDQ

SEQ ID NO: 126023 - protein, 9 aa, Homo sapiens
LYEDGEDQP

SEQ ID NO: 126024 - protein, 9 aa, Homo sapiens
YEDGEDQPK

SEQ ID NO: 126025 - protein, 9 aa, Homo sapiens
EDGEDQPKQ

SEQ ID NO: 126026 - protein, 9 aa, Homo sapiens
DGEDQPKQV

SEQ ID NO: 126027 - protein, 9 aa, Homo sapiens
GEDQPKQVY

SEQ ID NO: 126028 - protein, 9 aa, Homo sapiens
EDQPKQVYV

SEQ ID NO: 126029 - protein, 9 aa, Homo sapiens
DQPKQVYVD

SEQ ID NO: 126030 - protein, 9 aa, Homo sapiens
QPKQVYVDK

SEQ ID NO: 126031 - protein, 9 aa, Homo sapiens
PKQVYVDKL

SEQ ID NO: 126032 - protein, 9 aa, Homo sapiens
KQVYVDKLA

SEQ ID NO: 126033 - protein, 9 aa, Homo sapiens
QVYVDKLAE

SEQ ID NO: 126034 - protein, 9 aa, Homo sapiens
VYVDKLAEL

SEQ ID NO: 126035 - protein, 9 aa, Homo sapiens
YVDKLAELK

SEQ ID NO: 126036 - protein, 9 aa, Homo sapiens
VDKLAELKN

SEQ ID NO: 126037 - protein, 9 aa, Homo sapiens
DKLAELKNL

SEQ ID NO: 126038 - protein, 9 aa, Homo sapiens
KLAELKNLG

SEQ ID NO: 126039 - protein, 9 aa, Homo sapiens
LAELKNLGQ

SEQ ID NO: 126040 - protein, 9 aa, Homo sapiens
AELKNLGQP

SEQ ID NO: 126041 - protein, 9 aa, Homo sapiens
ELKNLGQPI

SEQ ID NO: 126042 - protein, 9 aa, Homo sapiens
LKNLGQPIK

SEQ ID NO: 126043 - protein, 9 aa, Homo sapiens
KNLGQPIKI

SEQ ID NO: 126044 - protein, 9 aa, Homo sapiens
NLGQPIKIR

SEQ ID NO: 126045 - protein, 9 aa, Homo sapiens
LGQPIKIRF

SEQ ID NO: 126046 - protein, 9 aa, Homo sapiens
GQPIKIRFQ

SEQ ID NO: 126047 - protein, 9 aa, Homo sapiens
QPIKIRFQE

SEQ ID NO: 126048 - protein, 9 aa, Homo sapiens
PIKIRFQES

SEQ ID NO: 126049 - protein, 9 aa, Homo sapiens
IKIRFQESE

SEQ ID NO: 126050 - protein, 9 aa, Homo sapiens
KIRFQESEE

SEQ ID NO: 126051 - protein, 9 aa, Homo sapiens
IRFQESEER

SEQ ID NO: 126052 - protein, 9 aa, Homo sapiens
RFQESEERP

SEQ ID NO: 126053 - protein, 9 aa, Homo sapiens
FQESEERPK

SEQ ID NO: 126054 - protein, 9 aa, Homo sapiens
QESEERPKL

SEQ ID NO: 126055 - protein, 9 aa, Homo sapiens
ESEERPKLF

SEQ ID NO: 126056 - protein, 9 aa, Homo sapiens
SEERPKLFE

SEQ ID NO: 126057 - protein, 9 aa, Homo sapiens
EERPKLFEE

SEQ ID NO: 126058 - protein, 9 aa, Homo sapiens
ERPKLFEEL

SEQ ID NO: 126059 - protein, 9 aa, Homo sapiens
RPKLFEELG

SEQ ID NO: 126060 - protein, 9 aa, Homo sapiens
PKLFEELGK

SEQ ID NO: 126061 - protein, 9 aa, Homo sapiens
KLFEELGKQ

SEQ ID NO: 126062 - protein, 9 aa, Homo sapiens
LFEELGKQI

SEQ ID NO: 126063 - protein, 9 aa, Homo sapiens
FEELGKQIQ

SEQ ID NO: 126064 - protein, 9 aa, Homo sapiens
EELGKQIQQ

SEQ ID NO: 126065 - protein, 9 aa, Homo sapiens
ELGKQIQQY

SEQ ID NO: 126066 - protein, 9 aa, Homo sapiens
LGKQIQQYM

SEQ ID NO: 126067 - protein, 9 aa, Homo sapiens
GKQIQQYMK

SEQ ID NO: 126068 - protein, 9 aa, Homo sapiens
KQIQQYMKI

SEQ ID NO: 126069 - protein, 9 aa, Homo sapiens
QIQQYMKII

SEQ ID NO: 126070 - protein, 9 aa, Homo sapiens
IQQYMKIIS

SEQ ID NO: 126071 - protein, 9 aa, Homo sapiens
QQYMKIISS

SEQ ID NO: 126072 - protein, 9 aa, Homo sapiens
QYMKIISSF

SEQ ID NO: 126073 - protein, 9 aa, Homo sapiens
YMKIISSFK

SEQ ID NO: 126074 - protein, 9 aa, Homo sapiens
MKIISSFKN

SEQ ID NO: 126075 - protein, 9 aa, Homo sapiens
KIISSFKNK

SEQ ID NO: 126076 - protein, 9 aa, Homo sapiens
IISSFKNKE

SEQ ID NO: 126077 - protein, 9 aa, Homo sapiens
ISSFKNKED

SEQ ID NO: 126078 - protein, 9 aa, Homo sapiens
SSFKNKEDQ

SEQ ID NO: 126079 - protein, 9 aa, Homo sapiens
SFKNKEDQY

SEQ ID NO: 126080 - protein, 9 aa, Homo sapiens
FKNKEDQYD

SEQ ID NO: 126081 - protein, 9 aa, Homo sapiens
KNKEDQYDH

SEQ ID NO: 126082 - protein, 9 aa, Homo sapiens
NKEDQYDHL

SEQ ID NO: 126083 - protein, 9 aa, Homo sapiens
KEDQYDHLD

SEQ ID NO: 126084 - protein, 9 aa, Homo sapiens
EDQYDHLDA

SEQ ID NO: 126085 - protein, 9 aa, Homo sapiens
DQYDHLDAA

SEQ ID NO: 126086 - protein, 9 aa, Homo sapiens
QYDHLDAAD

SEQ ID NO: 126087 - protein, 9 aa, Homo sapiens
YDHLDAADM

SEQ ID NO: 126088 - protein, 9 aa, Homo sapiens
DHLDAADMT

SEQ ID NO: 126089 - protein, 9 aa, Homo sapiens
HLDAADMTK

SEQ ID NO: 126090 - protein, 9 aa, Homo sapiens
LDAADMTKV

SEQ ID NO: 126091 - protein, 9 aa, Homo sapiens
DAADMTKVE

SEQ ID NO: 126092 - protein, 9 aa, Homo sapiens
AADMTKVEK

SEQ ID NO: 126093 - protein, 9 aa, Homo sapiens
ADMTKVEKS

SEQ ID NO: 126094 - protein, 9 aa, Homo sapiens
DMTKVEKST

SEQ ID NO: 126095 - protein, 9 aa, Homo sapiens
MTKVEKSTN

SEQ ID NO: 126096 - protein, 9 aa, Homo sapiens
TKVEKSTNE

SEQ ID NO: 126097 - protein, 9 aa, Homo sapiens
KVEKSTNEA

SEQ ID NO: 126098 - protein, 9 aa, Homo sapiens
VEKSTNEAM

SEQ ID NO: 126099 - protein, 9 aa, Homo sapiens
EKSTNEAME

SEQ ID NO: 126100 - protein, 9 aa, Homo sapiens
KSTNEAMEW

SEQ ID NO: 126101 - protein, 9 aa, Homo sapiens
STNEAMEWM

SEQ ID NO: 126102 - protein, 9 aa, Homo sapiens
TNEAMEWMN

SEQ ID NO: 126103 - protein, 9 aa, Homo sapiens
NEAMEWMNN

SEQ ID NO: 126104 - protein, 9 aa, Homo sapiens
EAMEWMNNK

SEQ ID NO: 126105 - protein, 9 aa, Homo sapiens
AMEWMNNKL

SEQ ID NO: 126106 - protein, 9 aa, Homo sapiens
MEWMNNKLN

SEQ ID NO: 126107 - protein, 9 aa, Homo sapiens
EWMNNKLNL

SEQ ID NO: 126108 - protein, 9 aa, Homo sapiens
WMNNKLNLQ

SEQ ID NO: 126109 - protein, 9 aa, Homo sapiens
MNNKLNLQN

SEQ ID NO: 126110 - protein, 9 aa, Homo sapiens
NNKLNLQNK

SEQ ID NO: 126111 - protein, 9 aa, Homo sapiens
NKLNLQNKQ

SEQ ID NO: 126112 - protein, 9 aa, Homo sapiens
KLNLQNKQS

SEQ ID NO: 126113 - protein, 9 aa, Homo sapiens
LNLQNKQSL

SEQ ID NO: 126114 - protein, 9 aa, Homo sapiens
NLQNKQSLT

SEQ ID NO: 126115 - protein, 9 aa, Homo sapiens
LQNKQSLTM

SEQ ID NO: 126116 - protein, 9 aa, Homo sapiens
QNKQSLTMD

SEQ ID NO: 126117 - protein, 9 aa, Homo sapiens
NKQSLTMDP

SEQ ID NO: 126118 - protein, 9 aa, Homo sapiens
KQSLTMDPV

SEQ ID NO: 126119 - protein, 9 aa, Homo sapiens
QSLTMDPVV

SEQ ID NO: 126120 - protein, 9 aa, Homo sapiens
SLTMDPVVK

SEQ ID NO: 126121 - protein, 9 aa, Homo sapiens
LTMDPVVKS

SEQ ID NO: 126122 - protein, 9 aa, Homo sapiens
TMDPVVKSK

SEQ ID NO: 126123 - protein, 9 aa, Homo sapiens
MDPVVKSKE

SEQ ID NO: 126124 - protein, 9 aa, Homo sapiens
DPVVKSKEI

SEQ ID NO: 126125 - protein, 9 aa, Homo sapiens
PVVKSKEIE

SEQ ID NO: 126126 - protein, 9 aa, Homo sapiens
VVKSKEIEA

SEQ ID NO: 126127 - protein, 9 aa, Homo sapiens
VKSKEIEAK

SEQ ID NO: 126128 - protein, 9 aa, Homo sapiens
KSKEIEAKI

SEQ ID NO: 126129 - protein, 9 aa, Homo sapiens
SKEIEAKIK

SEQ ID NO: 126130 - protein, 9 aa, Homo sapiens
KEIEAKIKE

SEQ ID NO: 126131 - protein, 9 aa, Homo sapiens
EIEAKIKEL

SEQ ID NO: 126132 - protein, 9 aa, Homo sapiens
IEAKIKELT

SEQ ID NO: 126133 - protein, 9 aa, Homo sapiens
EAKIKELTS

SEQ ID NO: 126134 - protein, 9 aa, Homo sapiens
AKIKELTST

SEQ ID NO: 126135 - protein, 9 aa, Homo sapiens
KIKELTSTC

SEQ ID NO: 126136 - protein, 9 aa, Homo sapiens
IKELTSTCS

SEQ ID NO: 126137 - protein, 9 aa, Homo sapiens
KELTSTCSP

SEQ ID NO: 126138 - protein, 9 aa, Homo sapiens
ELTSTCSPI

SEQ ID NO: 126139 - protein, 9 aa, Homo sapiens
LTSTCSPII

SEQ ID NO: 126140 - protein, 9 aa, Homo sapiens
TSTCSPIIS

SEQ ID NO: 126141 - protein, 9 aa, Homo sapiens
STCSPIISK

SEQ ID NO: 126142 - protein, 9 aa, Homo sapiens
TCSPIISKP

SEQ ID NO: 126143 - protein, 9 aa, Homo sapiens
CSPIISKPK

SEQ ID NO: 126144 - protein, 9 aa, Homo sapiens
SPIISKPKP

SEQ ID NO: 126145 - protein, 9 aa, Homo sapiens
PIISKPKPK

SEQ ID NO: 126146 - protein, 9 aa, Homo sapiens
IISKPKPKV

SEQ ID NO: 126147 - protein, 9 aa, Homo sapiens
ISKPKPKVE

SEQ ID NO: 126148 - protein, 9 aa, Homo sapiens
SKPKPKVEP

SEQ ID NO: 126149 - protein, 9 aa, Homo sapiens
KPKPKVEPP

SEQ ID NO: 126150 - protein, 9 aa, Homo sapiens
PKPKVEPPK

SEQ ID NO: 126151 - protein, 9 aa, Homo sapiens
KPKVEPPKE

SEQ ID NO: 126152 - protein, 9 aa, Homo sapiens
PKVEPPKEE

SEQ ID NO: 126153 - protein, 9 aa, Homo sapiens
KVEPPKEEQ

SEQ ID NO: 126154 - protein, 9 aa, Homo sapiens
VEPPKEEQK

SEQ ID NO: 126155 - protein, 9 aa, Homo sapiens
EPPKEEQKN

SEQ ID NO: 126156 - protein, 9 aa, Homo sapiens
PPKEEQKNA

SEQ ID NO: 126157 - protein, 9 aa, Homo sapiens
PKEEQKNAE

SEQ ID NO: 126158 - protein, 9 aa, Homo sapiens
KEEQKNAEQ

SEQ ID NO: 126159 - protein, 9 aa, Homo sapiens
EEQKNAEQN

SEQ ID NO: 126160 - protein, 9 aa, Homo sapiens
EQKNAEQNG

SEQ ID NO: 126161 - protein, 9 aa, Homo sapiens
QKNAEQNGP

SEQ ID NO: 126162 - protein, 9 aa, Homo sapiens
KNAEQNGPV

SEQ ID NO: 126163 - protein, 9 aa, Homo sapiens
NAEQNGPVD

SEQ ID NO: 126164 - protein, 9 aa, Homo sapiens
AEQNGPVDG

SEQ ID NO: 126165 - protein, 9 aa, Homo sapiens
EQNGPVDGQ

SEQ ID NO: 126166 - protein, 9 aa, Homo sapiens
QNGPVDGQG

SEQ ID NO: 126167 - protein, 9 aa, Homo sapiens
NGPVDGQGD

SEQ ID NO: 126168 - protein, 9 aa, Homo sapiens
GPVDGQGDN

SEQ ID NO: 126169 - protein, 9 aa, Homo sapiens
PVDGQGDNP

SEQ ID NO: 126170 - protein, 9 aa, Homo sapiens
VDGQGDNPG

SEQ ID NO: 126171 - protein, 9 aa, Homo sapiens
DGQGDNPGP

SEQ ID NO: 126172 - protein, 9 aa, Homo sapiens
GQGDNPGPQ

SEQ ID NO: 126173 - protein, 9 aa, Homo sapiens
QGDNPGPQA

SEQ ID NO: 126174 - protein, 9 aa, Homo sapiens
GDNPGPQAA

SEQ ID NO: 126175 - protein, 9 aa, Homo sapiens
DNPGPQAAE

SEQ ID NO: 126176 - protein, 9 aa, Homo sapiens
NPGPQAAEQ

SEQ ID NO: 126177 - protein, 9 aa, Homo sapiens
PGPQAAEQG

SEQ ID NO: 126178 - protein, 9 aa, Homo sapiens
GPQAAEQGT

SEQ ID NO: 126179 - protein, 9 aa, Homo sapiens
PQAAEQGTD

SEQ ID NO: 126180 - protein, 9 aa, Homo sapiens
QAAEQGTDT

SEQ ID NO: 126181 - protein, 9 aa, Homo sapiens
AAEQGTDTA

SEQ ID NO: 126182 - protein, 9 aa, Homo sapiens
AEQGTDTAV

SEQ ID NO: 126183 - protein, 9 aa, Homo sapiens
EQGTDTAVP

SEQ ID NO: 126184 - protein, 9 aa, Homo sapiens
QGTDTAVPS

SEQ ID NO: 126185 - protein, 9 aa, Homo sapiens
GTDTAVPSD

SEQ ID NO: 126186 - protein, 9 aa, Homo sapiens
TDTAVPSDS

SEQ ID NO: 126187 - protein, 9 aa, Homo sapiens
DTAVPSDSD

SEQ ID NO: 126188 - protein, 9 aa, Homo sapiens
TAVPSDSDK

SEQ ID NO: 126189 - protein, 9 aa, Homo sapiens
AVPSDSDKK

SEQ ID NO: 126190 - protein, 9 aa, Homo sapiens
VPSDSDKKL

SEQ ID NO: 126191 - protein, 9 aa, Homo sapiens
PSDSDKKLP

SEQ ID NO: 126192 - protein, 9 aa, Homo sapiens
SDSDKKLPE

SEQ ID NO: 126193 - protein, 9 aa, Homo sapiens
DSDKKLPEM

SEQ ID NO: 126194 - protein, 9 aa, Homo sapiens
SDKKLPEMD

SEQ ID NO: 126195 - protein, 9 aa, Homo sapiens
DKKLPEMDI

SEQ ID NO: 126196 - protein, 9 aa, Homo sapiens
KKLPEMDID

SEQ ID NO: 126197 - protein, 9 aa, Homo sapiens
MGPKDSAKC

SEQ ID NO: 126198 - protein, 9 aa, Homo sapiens
GPKDSAKCL

SEQ ID NO: 126199 - protein, 9 aa, Homo sapiens
PKDSAKCLH

SEQ ID NO: 126200 - protein, 9 aa, Homo sapiens
KDSAKCLHR

SEQ ID NO: 126201 - protein, 9 aa, Homo sapiens
DSAKCLHRG

SEQ ID NO: 126202 - protein, 9 aa, Homo sapiens
SAKCLHRGP

SEQ ID NO: 126203 - protein, 9 aa, Homo sapiens
AKCLHRGPQ

SEQ ID NO: 126204 - protein, 9 aa, Homo sapiens
KCLHRGPQP

SEQ ID NO: 126205 - protein, 9 aa, Homo sapiens
CLHRGPQPS

SEQ ID NO: 126206 - protein, 9 aa, Homo sapiens
LHRGPQPSH

SEQ ID NO: 126207 - protein, 9 aa, Homo sapiens
HRGPQPSHW

SEQ ID NO: 126208 - protein, 9 aa, Homo sapiens
RGPQPSHWA

SEQ ID NO: 126209 - protein, 9 aa, Homo sapiens
GPQPSHWAA

SEQ ID NO: 126210 - protein, 9 aa, Homo sapiens
PQPSHWAAG

SEQ ID NO: 126211 - protein, 9 aa, Homo sapiens
QPSHWAAGD

SEQ ID NO: 126212 - protein, 9 aa, Homo sapiens
PSHWAAGDG

SEQ ID NO: 126213 - protein, 9 aa, Homo sapiens
SHWAAGDGP

SEQ ID NO: 126214 - protein, 9 aa, Homo sapiens
HWAAGDGPT

SEQ ID NO: 126215 - protein, 9 aa, Homo sapiens
WAAGDGPTQ

SEQ ID NO: 126216 - protein, 9 aa, Homo sapiens
AAGDGPTQE

SEQ ID NO: 126217 - protein, 9 aa, Homo sapiens
AGDGPTQER

SEQ ID NO: 126218 - protein, 9 aa, Homo sapiens
GDGPTQERC

SEQ ID NO: 126219 - protein, 9 aa, Homo sapiens
DGPTQERCG

SEQ ID NO: 126220 - protein, 9 aa, Homo sapiens
GPTQERCGP

SEQ ID NO: 126221 - protein, 9 aa, Homo sapiens
PTQERCGPR

SEQ ID NO: 126222 - protein, 9 aa, Homo sapiens
TQERCGPRS

SEQ ID NO: 126223 - protein, 9 aa, Homo sapiens
QERCGPRSL

SEQ ID NO: 126224 - protein, 9 aa, Homo sapiens
ERCGPRSLG

SEQ ID NO: 126225 - protein, 9 aa, Homo sapiens
RCGPRSLGS

SEQ ID NO: 126226 - protein, 9 aa, Homo sapiens
CGPRSLGSP

SEQ ID NO: 126227 - protein, 9 aa, Homo sapiens
GPRSLGSPV

SEQ ID NO: 126228 - protein, 9 aa, Homo sapiens
PRSLGSPVL

SEQ ID NO: 126229 - protein, 9 aa, Homo sapiens
RSLGSPVLG

SEQ ID NO: 126230 - protein, 9 aa, Homo sapiens
SLGSPVLGL

SEQ ID NO: 126231 - protein, 9 aa, Homo sapiens
LGSPVLGLD

SEQ ID NO: 126232 - protein, 9 aa, Homo sapiens
GSPVLGLDT

SEQ ID NO: 126233 - protein, 9 aa, Homo sapiens
SPVLGLDTC

SEQ ID NO: 126234 - protein, 9 aa, Homo sapiens
PVLGLDTCR

SEQ ID NO: 126235 - protein, 9 aa, Homo sapiens
VLGLDTCRA

SEQ ID NO: 126236 - protein, 9 aa, Homo sapiens
LGLDTCRAW

SEQ ID NO: 126237 - protein, 9 aa, Homo sapiens
GLDTCRAWD

SEQ ID NO: 126238 - protein, 9 aa, Homo sapiens
LDTCRAWDH

SEQ ID NO: 126239 - protein, 9 aa, Homo sapiens
DTCRAWDHV

SEQ ID NO: 126240 - protein, 9 aa, Homo sapiens
TCRAWDHVD

SEQ ID NO: 126241 - protein, 9 aa, Homo sapiens
CRAWDHVDG

SEQ ID NO: 126242 - protein, 9 aa, Homo sapiens
RAWDHVDGQ

SEQ ID NO: 126243 - protein, 9 aa, Homo sapiens
AWDHVDGQI

SEQ ID NO: 126244 - protein, 9 aa, Homo sapiens
WDHVDGQIL

SEQ ID NO: 126245 - protein, 9 aa, Homo sapiens
DHVDGQILG

SEQ ID NO: 126246 - protein, 9 aa, Homo sapiens
HVDGQILGQ

SEQ ID NO: 126247 - protein, 9 aa, Homo sapiens
VDGQILGQL

SEQ ID NO: 126248 - protein, 9 aa, Homo sapiens
DGQILGQLR

SEQ ID NO: 126249 - protein, 9 aa, Homo sapiens
GQILGQLRP

SEQ ID NO: 126250 - protein, 9 aa, Homo sapiens
QILGQLRPL

SEQ ID NO: 126251 - protein, 9 aa, Homo sapiens
ILGQLRPLT

SEQ ID NO: 126252 - protein, 9 aa, Homo sapiens
LGQLRPLTE

SEQ ID NO: 126253 - protein, 9 aa, Homo sapiens
GQLRPLTEE

SEQ ID NO: 126254 - protein, 9 aa, Homo sapiens
QLRPLTEEE

SEQ ID NO: 126255 - protein, 9 aa, Homo sapiens
LRPLTEEEE

SEQ ID NO: 126256 - protein, 9 aa, Homo sapiens
RPLTEEEEE

SEQ ID NO: 126257 - protein, 9 aa, Homo sapiens
PLTEEEEEE

SEQ ID NO: 126258 - protein, 9 aa, Homo sapiens
LTEEEEEEG

SEQ ID NO: 126259 - protein, 9 aa, Homo sapiens
TEEEEEEGA

SEQ ID NO: 126260 - protein, 9 aa, Homo sapiens
EEEEEEGAG

SEQ ID NO: 126261 - protein, 9 aa, Homo sapiens
EEEEEGAGA

SEQ ID NO: 126262 - protein, 9 aa, Homo sapiens
EEEEGAGAT

SEQ ID NO: 126263 - protein, 9 aa, Homo sapiens
EEEGAGATL

SEQ ID NO: 126264 - protein, 9 aa, Homo sapiens
EEGAGATLS

SEQ ID NO: 126265 - protein, 9 aa, Homo sapiens
EGAGATLSR

SEQ ID NO: 126266 - protein, 9 aa, Homo sapiens
GAGATLSRG

SEQ ID NO: 126267 - protein, 9 aa, Homo sapiens
AGATLSRGP

SEQ ID NO: 126268 - protein, 9 aa, Homo sapiens
GATLSRGPA

SEQ ID NO: 126269 - protein, 9 aa, Homo sapiens
ATLSRGPAF

SEQ ID NO: 126270 - protein, 9 aa, Homo sapiens
TLSRGPAFP

SEQ ID NO: 126271 - protein, 9 aa, Homo sapiens
LSRGPAFPG

SEQ ID NO: 126272 - protein, 9 aa, Homo sapiens
SRGPAFPGM

SEQ ID NO: 126273 - protein, 9 aa, Homo sapiens
RGPAFPGMG

SEQ ID NO: 126274 - protein, 9 aa, Homo sapiens
GPAFPGMGS

SEQ ID NO: 126275 - protein, 9 aa, Homo sapiens
PAFPGMGSE

SEQ ID NO: 126276 - protein, 9 aa, Homo sapiens
AFPGMGSEE

SEQ ID NO: 126277 - protein, 9 aa, Homo sapiens
FPGMGSEEL

SEQ ID NO: 126278 - protein, 9 aa, Homo sapiens
PGMGSEELR

SEQ ID NO: 126279 - protein, 9 aa, Homo sapiens
GMGSEELRL

SEQ ID NO: 126280 - protein, 9 aa, Homo sapiens
MGSEELRLA

SEQ ID NO: 126281 - protein, 9 aa, Homo sapiens
GSEELRLAS

SEQ ID NO: 126282 - protein, 9 aa, Homo sapiens
SEELRLASF

SEQ ID NO: 126283 - protein, 9 aa, Homo sapiens
EELRLASFY

SEQ ID NO: 126284 - protein, 9 aa, Homo sapiens
ELRLASFYD

SEQ ID NO: 126285 - protein, 9 aa, Homo sapiens
LRLASFYDW

SEQ ID NO: 126286 - protein, 9 aa, Homo sapiens
RLASFYDWP

SEQ ID NO: 126287 - protein, 9 aa, Homo sapiens
LASFYDWPL

SEQ ID NO: 126288 - protein, 9 aa, Homo sapiens
ASFYDWPLT

SEQ ID NO: 126289 - protein, 9 aa, Homo sapiens
SFYDWPLTA

SEQ ID NO: 126290 - protein, 9 aa, Homo sapiens
FYDWPLTAE

SEQ ID NO: 126291 - protein, 9 aa, Homo sapiens
YDWPLTAEV

SEQ ID NO: 126292 - protein, 9 aa, Homo sapiens
DWPLTAEVP

SEQ ID NO: 126293 - protein, 9 aa, Homo sapiens
WPLTAEVPP

SEQ ID NO: 126294 - protein, 9 aa, Homo sapiens
PLTAEVPPE

SEQ ID NO: 126295 - protein, 9 aa, Homo sapiens
LTAEVPPEL

SEQ ID NO: 126296 - protein, 9 aa, Homo sapiens
TAEVPPELL

SEQ ID NO: 126297 - protein, 9 aa, Homo sapiens
AEVPPELLA

SEQ ID NO: 126298 - protein, 9 aa, Homo sapiens
EVPPELLAA

SEQ ID NO: 126299 - protein, 9 aa, Homo sapiens
VPPELLAAA

SEQ ID NO: 126300 - protein, 9 aa, Homo sapiens
PPELLAAAG

SEQ ID NO: 126301 - protein, 9 aa, Homo sapiens
PELLAAAGF

SEQ ID NO: 126302 - protein, 9 aa, Homo sapiens
ELLAAAGFF

SEQ ID NO: 126303 - protein, 9 aa, Homo sapiens
LLAAAGFFH

SEQ ID NO: 126304 - protein, 9 aa, Homo sapiens
LAAAGFFHT

SEQ ID NO: 126305 - protein, 9 aa, Homo sapiens
AAAGFFHTG

SEQ ID NO: 126306 - protein, 9 aa, Homo sapiens
AAGFFHTGH

SEQ ID NO: 126307 - protein, 9 aa, Homo sapiens
AGFFHTGHQ

SEQ ID NO: 126308 - protein, 9 aa, Homo sapiens
GFFHTGHQD

SEQ ID NO: 126309 - protein, 9 aa, Homo sapiens
FFHTGHQDK

SEQ ID NO: 126310 - protein, 9 aa, Homo sapiens
FHTGHQDKV

SEQ ID NO: 126311 - protein, 9 aa, Homo sapiens
HTGHQDKVR

SEQ ID NO: 126312 - protein, 9 aa, Homo sapiens
TGHQDKVRC

SEQ ID NO: 126313 - protein, 9 aa, Homo sapiens
GHQDKVRCF

SEQ ID NO: 126314 - protein, 9 aa, Homo sapiens
HQDKVRCFF

SEQ ID NO: 126315 - protein, 9 aa, Homo sapiens
QDKVRCFFC

SEQ ID NO: 126316 - protein, 9 aa, Homo sapiens
DKVRCFFCY

SEQ ID NO: 126317 - protein, 9 aa, Homo sapiens
KVRCFFCYG

SEQ ID NO: 126318 - protein, 9 aa, Homo sapiens
VRCFFCYGG

SEQ ID NO: 126319 - protein, 9 aa, Homo sapiens
RCFFCYGGL

SEQ ID NO: 126320 - protein, 9 aa, Homo sapiens
CFFCYGGLQ

SEQ ID NO: 126321 - protein, 9 aa, Homo sapiens
FFCYGGLQS

SEQ ID NO: 126322 - protein, 9 aa, Homo sapiens
FCYGGLQSW

SEQ ID NO: 126323 - protein, 9 aa, Homo sapiens
CYGGLQSWK

SEQ ID NO: 126324 - protein, 9 aa, Homo sapiens
YGGLQSWKR

SEQ ID NO: 126325 - protein, 9 aa, Homo sapiens
GGLQSWKRG

SEQ ID NO: 126326 - protein, 9 aa, Homo sapiens
GLQSWKRGD

SEQ ID NO: 126327 - protein, 9 aa, Homo sapiens
LQSWKRGDD

SEQ ID NO: 126328 - protein, 9 aa, Homo sapiens
QSWKRGDDP

SEQ ID NO: 126329 - protein, 9 aa, Homo sapiens
SWKRGDDPW

SEQ ID NO: 126330 - protein, 9 aa, Homo sapiens
WKRGDDPWT

SEQ ID NO: 126331 - protein, 9 aa, Homo sapiens
KRGDDPWTE

SEQ ID NO: 126332 - protein, 9 aa, Homo sapiens
RGDDPWTEH

SEQ ID NO: 126333 - protein, 9 aa, Homo sapiens
GDDPWTEHA

SEQ ID NO: 126334 - protein, 9 aa, Homo sapiens
DDPWTEHAK

SEQ ID NO: 126335 - protein, 9 aa, Homo sapiens
DPWTEHAKW

SEQ ID NO: 126336 - protein, 9 aa, Homo sapiens
PWTEHAKWF

SEQ ID NO: 126337 - protein, 9 aa, Homo sapiens
WTEHAKWFP

SEQ ID NO: 126338 - protein, 9 aa, Homo sapiens
TEHAKWFPS

SEQ ID NO: 126339 - protein, 9 aa, Homo sapiens
EHAKWFPSC

SEQ ID NO: 126340 - protein, 9 aa, Homo sapiens
HAKWFPSCQ

SEQ ID NO: 126341 - protein, 9 aa, Homo sapiens
AKWFPSCQF

SEQ ID NO: 126342 - protein, 9 aa, Homo sapiens
KWFPSCQFL

SEQ ID NO: 126343 - protein, 9 aa, Homo sapiens
WFPSCQFLL

SEQ ID NO: 126344 - protein, 9 aa, Homo sapiens
FPSCQFLLR

SEQ ID NO: 126345 - protein, 9 aa, Homo sapiens
PSCQFLLRS

SEQ ID NO: 126346 - protein, 9 aa, Homo sapiens
SCQFLLRSK

SEQ ID NO: 126347 - protein, 9 aa, Homo sapiens
CQFLLRSKG

SEQ ID NO: 126348 - protein, 9 aa, Homo sapiens
QFLLRSKGR

SEQ ID NO: 126349 - protein, 9 aa, Homo sapiens
FLLRSKGRD

SEQ ID NO: 126350 - protein, 9 aa, Homo sapiens
LLRSKGRDF

SEQ ID NO: 126351 - protein, 9 aa, Homo sapiens
LRSKGRDFV

SEQ ID NO: 126352 - protein, 9 aa, Homo sapiens
RSKGRDFVH

SEQ ID NO: 126353 - protein, 9 aa, Homo sapiens
SKGRDFVHS

SEQ ID NO: 126354 - protein, 9 aa, Homo sapiens
KGRDFVHSV

SEQ ID NO: 126355 - protein, 9 aa, Homo sapiens
GRDFVHSVQ

SEQ ID NO: 126356 - protein, 9 aa, Homo sapiens
RDFVHSVQE

SEQ ID NO: 126357 - protein, 9 aa, Homo sapiens
DFVHSVQET

SEQ ID NO: 126358 - protein, 9 aa, Homo sapiens
FVHSVQETH

SEQ ID NO: 126359 - protein, 9 aa, Homo sapiens
VHSVQETHS

SEQ ID NO: 126360 - protein, 9 aa, Homo sapiens
HSVQETHSQ

SEQ ID NO: 126361 - protein, 9 aa, Homo sapiens
SVQETHSQL

SEQ ID NO: 126362 - protein, 9 aa, Homo sapiens
VQETHSQLL

SEQ ID NO: 126363 - protein, 9 aa, Homo sapiens
QETHSQLLG

SEQ ID NO: 126364 - protein, 9 aa, Homo sapiens
ETHSQLLGS

SEQ ID NO: 126365 - protein, 9 aa, Homo sapiens
THSQLLGSW

SEQ ID NO: 126366 - protein, 9 aa, Homo sapiens
HSQLLGSWD

SEQ ID NO: 126367 - protein, 9 aa, Homo sapiens
SQLLGSWDP

SEQ ID NO: 126368 - protein, 9 aa, Homo sapiens
QLLGSWDPW

SEQ ID NO: 126369 - protein, 9 aa, Homo sapiens
LLGSWDPWE

SEQ ID NO: 126370 - protein, 9 aa, Homo sapiens
LGSWDPWEE

SEQ ID NO: 126371 - protein, 9 aa, Homo sapiens
GSWDPWEEP

SEQ ID NO: 126372 - protein, 9 aa, Homo sapiens
SWDPWEEPE

SEQ ID NO: 126373 - protein, 9 aa, Homo sapiens
WDPWEEPED

SEQ ID NO: 126374 - protein, 9 aa, Homo sapiens
DPWEEPEDA

SEQ ID NO: 126375 - protein, 9 aa, Homo sapiens
PWEEPEDAA

SEQ ID NO: 126376 - protein, 9 aa, Homo sapiens
WEEPEDAAP

SEQ ID NO: 126377 - protein, 9 aa, Homo sapiens
EEPEDAAPV

SEQ ID NO: 126378 - protein, 9 aa, Homo sapiens
EPEDAAPVA

SEQ ID NO: 126379 - protein, 9 aa, Homo sapiens
PEDAAPVAP

SEQ ID NO: 126380 - protein, 9 aa, Homo sapiens
EDAAPVAPS

SEQ ID NO: 126381 - protein, 9 aa, Homo sapiens
DAAPVAPSV

SEQ ID NO: 126382 - protein, 9 aa, Homo sapiens
AAPVAPSVP

SEQ ID NO: 126383 - protein, 9 aa, Homo sapiens
APVAPSVPA

SEQ ID NO: 126384 - protein, 9 aa, Homo sapiens
PVAPSVPAS

SEQ ID NO: 126385 - protein, 9 aa, Homo sapiens
VAPSVPASG

SEQ ID NO: 126386 - protein, 9 aa, Homo sapiens
APSVPASGY

SEQ ID NO: 126387 - protein, 9 aa, Homo sapiens
PSVPASGYP

SEQ ID NO: 126388 - protein, 9 aa, Homo sapiens
SVPASGYPE

SEQ ID NO: 126389 - protein, 9 aa, Homo sapiens
VPASGYPEL

SEQ ID NO: 126390 - protein, 9 aa, Homo sapiens
PASGYPELP

SEQ ID NO: 126391 - protein, 9 aa, Homo sapiens
ASGYPELPT

SEQ ID NO: 126392 - protein, 9 aa, Homo sapiens
SGYPELPTP

SEQ ID NO: 126393 - protein, 9 aa, Homo sapiens
GYPELPTPR

SEQ ID NO: 126394 - protein, 9 aa, Homo sapiens
YPELPTPRR

SEQ ID NO: 126395 - protein, 9 aa, Homo sapiens
PELPTPRRE

SEQ ID NO: 126396 - protein, 9 aa, Homo sapiens
ELPTPRREV

SEQ ID NO: 126397 - protein, 9 aa, Homo sapiens
LPTPRREVQ

SEQ ID NO: 126398 - protein, 9 aa, Homo sapiens
PTPRREVQS

SEQ ID NO: 126399 - protein, 9 aa, Homo sapiens
TPRREVQSE

SEQ ID NO: 126400 - protein, 9 aa, Homo sapiens
PRREVQSES

SEQ ID NO: 126401 - protein, 9 aa, Homo sapiens
RREVQSESA

SEQ ID NO: 126402 - protein, 9 aa, Homo sapiens
REVQSESAQ

SEQ ID NO: 126403 - protein, 9 aa, Homo sapiens
EVQSESAQE

SEQ ID NO: 126404 - protein, 9 aa, Homo sapiens
VQSESAQEP

SEQ ID NO: 126405 - protein, 9 aa, Homo sapiens
QSESAQEPG

SEQ ID NO: 126406 - protein, 9 aa, Homo sapiens
SESAQEPGG

SEQ ID NO: 126407 - protein, 9 aa, Homo sapiens
ESAQEPGGV

SEQ ID NO: 126408 - protein, 9 aa, Homo sapiens
SAQEPGGVS

SEQ ID NO: 126409 - protein, 9 aa, Homo sapiens
AQEPGGVSP

SEQ ID NO: 126410 - protein, 9 aa, Homo sapiens
QEPGGVSPA

SEQ ID NO: 126411 - protein, 9 aa, Homo sapiens
EPGGVSPAE

SEQ ID NO: 126412 - protein, 9 aa, Homo sapiens
PGGVSPAEA

SEQ ID NO: 126413 - protein, 9 aa, Homo sapiens
GGVSPAEAQ

SEQ ID NO: 126414 - protein, 9 aa, Homo sapiens
GVSPAEAQR

SEQ ID NO: 126415 - protein, 9 aa, Homo sapiens
VSPAEAQRA

SEQ ID NO: 126416 - protein, 9 aa, Homo sapiens
SPAEAQRAW

SEQ ID NO: 126417 - protein, 9 aa, Homo sapiens
PAEAQRAWW

SEQ ID NO: 126418 - protein, 9 aa, Homo sapiens
AEAQRAWWV

SEQ ID NO: 126419 - protein, 9 aa, Homo sapiens
EAQRAWWVL

SEQ ID NO: 126420 - protein, 9 aa, Homo sapiens
AQRAWWVLE

SEQ ID NO: 126421 - protein, 9 aa, Homo sapiens
QRAWWVLEP

SEQ ID NO: 126422 - protein, 9 aa, Homo sapiens
RAWWVLEPP

SEQ ID NO: 126423 - protein, 9 aa, Homo sapiens
AWWVLEPPG

SEQ ID NO: 126424 - protein, 9 aa, Homo sapiens
WWVLEPPGA

SEQ ID NO: 126425 - protein, 9 aa, Homo sapiens
WVLEPPGAR

SEQ ID NO: 126426 - protein, 9 aa, Homo sapiens
VLEPPGARD

SEQ ID NO: 126427 - protein, 9 aa, Homo sapiens
LEPPGARDV

SEQ ID NO: 126428 - protein, 9 aa, Homo sapiens
EPPGARDVE

SEQ ID NO: 126429 - protein, 9 aa, Homo sapiens
PPGARDVEA

SEQ ID NO: 126430 - protein, 9 aa, Homo sapiens
PGARDVEAQ

SEQ ID NO: 126431 - protein, 9 aa, Homo sapiens
GARDVEAQL

SEQ ID NO: 126432 - protein, 9 aa, Homo sapiens
ARDVEAQLR

SEQ ID NO: 126433 - protein, 9 aa, Homo sapiens
RDVEAQLRR

SEQ ID NO: 126434 - protein, 9 aa, Homo sapiens
DVEAQLRRL

SEQ ID NO: 126435 - protein, 9 aa, Homo sapiens
VEAQLRRLQ

SEQ ID NO: 126436 - protein, 9 aa, Homo sapiens
EAQLRRLQE

SEQ ID NO: 126437 - protein, 9 aa, Homo sapiens
AQLRRLQEE

SEQ ID NO: 126438 - protein, 9 aa, Homo sapiens
QLRRLQEER

SEQ ID NO: 126439 - protein, 9 aa, Homo sapiens
LRRLQEERT

SEQ ID NO: 126440 - protein, 9 aa, Homo sapiens
RRLQEERTC

SEQ ID NO: 126441 - protein, 9 aa, Homo sapiens
RLQEERTCK

SEQ ID NO: 126442 - protein, 9 aa, Homo sapiens
LQEERTCKV

SEQ ID NO: 126443 - protein, 9 aa, Homo sapiens
QEERTCKVC

SEQ ID NO: 126444 - protein, 9 aa, Homo sapiens
EERTCKVCL

SEQ ID NO: 126445 - protein, 9 aa, Homo sapiens
ERTCKVCLD

SEQ ID NO: 126446 - protein, 9 aa, Homo sapiens
RTCKVCLDR

SEQ ID NO: 126447 - protein, 9 aa, Homo sapiens
TCKVCLDRA

SEQ ID NO: 126448 - protein, 9 aa, Homo sapiens
CKVCLDRAV

SEQ ID NO: 126449 - protein, 9 aa, Homo sapiens
KVCLDRAVS

SEQ ID NO: 126450 - protein, 9 aa, Homo sapiens
VCLDRAVSI

SEQ ID NO: 126451 - protein, 9 aa, Homo sapiens
CLDRAVSIV

SEQ ID NO: 126452 - protein, 9 aa, Homo sapiens
LDRAVSIVF

SEQ ID NO: 126453 - protein, 9 aa, Homo sapiens
DRAVSIVFV

SEQ ID NO: 126454 - protein, 9 aa, Homo sapiens
RAVSIVFVP

SEQ ID NO: 126455 - protein, 9 aa, Homo sapiens
AVSIVFVPC

SEQ ID NO: 126456 - protein, 9 aa, Homo sapiens
VSIVFVPCG

SEQ ID NO: 126457 - protein, 9 aa, Homo sapiens
SIVFVPCGH

SEQ ID NO: 126458 - protein, 9 aa, Homo sapiens
IVFVPCGHL

SEQ ID NO: 126459 - protein, 9 aa, Homo sapiens
VFVPCGHLV

SEQ ID NO: 126460 - protein, 9 aa, Homo sapiens
FVPCGHLVC

SEQ ID NO: 126461 - protein, 9 aa, Homo sapiens
VPCGHLVCA

SEQ ID NO: 126462 - protein, 9 aa, Homo sapiens
PCGHLVCAE

SEQ ID NO: 126463 - protein, 9 aa, Homo sapiens
CGHLVCAEC

SEQ ID NO: 126464 - protein, 9 aa, Homo sapiens
GHLVCAECA

SEQ ID NO: 126465 - protein, 9 aa, Homo sapiens
HLVCAECAP

SEQ ID NO: 126466 - protein, 9 aa, Homo sapiens
LVCAECAPG

SEQ ID NO: 126467 - protein, 9 aa, Homo sapiens
VCAECAPGL

SEQ ID NO: 126468 - protein, 9 aa, Homo sapiens
CAECAPGLQ

SEQ ID NO: 126469 - protein, 9 aa, Homo sapiens
AECAPGLQL

SEQ ID NO: 126470 - protein, 9 aa, Homo sapiens
ECAPGLQLC

SEQ ID NO: 126471 - protein, 9 aa, Homo sapiens
CAPGLQLCP

SEQ ID NO: 126472 - protein, 9 aa, Homo sapiens
APGLQLCPI

SEQ ID NO: 126473 - protein, 9 aa, Homo sapiens
PGLQLCPIC

SEQ ID NO: 126474 - protein, 9 aa, Homo sapiens
GLQLCPICR

SEQ ID NO: 126475 - protein, 9 aa, Homo sapiens
LQLCPICRA

SEQ ID NO: 126476 - protein, 9 aa, Homo sapiens
QLCPICRAP

SEQ ID NO: 126477 - protein, 9 aa, Homo sapiens
LCPICRAPV

SEQ ID NO: 126478 - protein, 9 aa, Homo sapiens
CPICRAPVR

SEQ ID NO: 126479 - protein, 9 aa, Homo sapiens
PICRAPVRS

SEQ ID NO: 126480 - protein, 9 aa, Homo sapiens
ICRAPVRSR

SEQ ID NO: 126481 - protein, 9 aa, Homo sapiens
CRAPVRSRV

SEQ ID NO: 126482 - protein, 9 aa, Homo sapiens
RAPVRSRVR

SEQ ID NO: 126483 - protein, 9 aa, Homo sapiens
APVRSRVRT

SEQ ID NO: 126484 - protein, 9 aa, Homo sapiens
PVRSRVRTF

SEQ ID NO: 126485 - protein, 9 aa, Homo sapiens
VRSRVRTFL

SEQ ID NO: 126486 - protein, 9 aa, Homo sapiens
RSRVRTFLS

SEQ ID NO: 126487 - protein, 9 aa, Homo sapiens
MSLEQRSLH

SEQ ID NO: 126488 - protein, 9 aa, Homo sapiens
SLEQRSLHC

SEQ ID NO: 126489 - protein, 9 aa, Homo sapiens
LEQRSLHCK

SEQ ID NO: 126490 - protein, 9 aa, Homo sapiens
EQRSLHCKP

SEQ ID NO: 126491 - protein, 9 aa, Homo sapiens
QRSLHCKPE

SEQ ID NO: 126492 - protein, 9 aa, Homo sapiens
RSLHCKPEE

SEQ ID NO: 126493 - protein, 9 aa, Homo sapiens
SLHCKPEEA

SEQ ID NO: 126494 - protein, 9 aa, Homo sapiens
LHCKPEEAL

SEQ ID NO: 126495 - protein, 9 aa, Homo sapiens
HCKPEEALE

SEQ ID NO: 126496 - protein, 9 aa, Homo sapiens
CKPEEALEA

SEQ ID NO: 126497 - protein, 9 aa, Homo sapiens
KPEEALEAQ

SEQ ID NO: 126498 - protein, 9 aa, Homo sapiens
PEEALEAQQ

SEQ ID NO: 126499 - protein, 9 aa, Homo sapiens
EEALEAQQE

SEQ ID NO: 126500 - protein, 9 aa, Homo sapiens
EALEAQQEA

SEQ ID NO: 126501 - protein, 9 aa, Homo sapiens
ALEAQQEAL

SEQ ID NO: 126502 - protein, 9 aa, Homo sapiens
LEAQQEALG

SEQ ID NO: 126503 - protein, 9 aa, Homo sapiens
EAQQEALGL

SEQ ID NO: 126504 - protein, 9 aa, Homo sapiens
AQQEALGLV

SEQ ID NO: 126505 - protein, 9 aa, Homo sapiens
QQEALGLVC

SEQ ID NO: 126506 - protein, 9 aa, Homo sapiens
QEALGLVCV

SEQ ID NO: 126507 - protein, 9 aa, Homo sapiens
EALGLVCVQ

SEQ ID NO: 126508 - protein, 9 aa, Homo sapiens
ALGLVCVQA

SEQ ID NO: 126509 - protein, 9 aa, Homo sapiens
LGLVCVQAA

SEQ ID NO: 126510 - protein, 9 aa, Homo sapiens
GLVCVQAAT

SEQ ID NO: 126511 - protein, 9 aa, Homo sapiens
LVCVQAATS

SEQ ID NO: 126512 - protein, 9 aa, Homo sapiens
VCVQAATSS

SEQ ID NO: 126513 - protein, 9 aa, Homo sapiens
CVQAATSSS

SEQ ID NO: 126514 - protein, 9 aa, Homo sapiens
VQAATSSSS

SEQ ID NO: 126515 - protein, 9 aa, Homo sapiens
QAATSSSSP

SEQ ID NO: 126516 - protein, 9 aa, Homo sapiens
AATSSSSPL

SEQ ID NO: 126517 - protein, 9 aa, Homo sapiens
ATSSSSPLV

SEQ ID NO: 126518 - protein, 9 aa, Homo sapiens
TSSSSPLVL

SEQ ID NO: 126519 - protein, 9 aa, Homo sapiens
SSSSPLVLG

SEQ ID NO: 126520 - protein, 9 aa, Homo sapiens
SSSPLVLGT

SEQ ID NO: 126521 - protein, 9 aa, Homo sapiens
SSPLVLGTL

SEQ ID NO: 126522 - protein, 9 aa, Homo sapiens
SPLVLGTLE

SEQ ID NO: 126523 - protein, 9 aa, Homo sapiens
PLVLGTLEE

SEQ ID NO: 126524 - protein, 9 aa, Homo sapiens
LVLGTLEEV

SEQ ID NO: 126525 - protein, 9 aa, Homo sapiens
VLGTLEEVP

SEQ ID NO: 126526 - protein, 9 aa, Homo sapiens
LGTLEEVPT

SEQ ID NO: 126527 - protein, 9 aa, Homo sapiens
GTLEEVPTA

SEQ ID NO: 126528 - protein, 9 aa, Homo sapiens
TLEEVPTAG

SEQ ID NO: 126529 - protein, 9 aa, Homo sapiens
LEEVPTAGS

SEQ ID NO: 126530 - protein, 9 aa, Homo sapiens
EEVPTAGST

SEQ ID NO: 126531 - protein, 9 aa, Homo sapiens
EVPTAGSTD

SEQ ID NO: 126532 - protein, 9 aa, Homo sapiens
VPTAGSTDP

SEQ ID NO: 126533 - protein, 9 aa, Homo sapiens
PTAGSTDPP

SEQ ID NO: 126534 - protein, 9 aa, Homo sapiens
TAGSTDPPQ

SEQ ID NO: 126535 - protein, 9 aa, Homo sapiens
AGSTDPPQS

SEQ ID NO: 126536 - protein, 9 aa, Homo sapiens
GSTDPPQSP

SEQ ID NO: 126537 - protein, 9 aa, Homo sapiens
STDPPQSPQ

SEQ ID NO: 126538 - protein, 9 aa, Homo sapiens
TDPPQSPQG

SEQ ID NO: 126539 - protein, 9 aa, Homo sapiens
DPPQSPQGA

SEQ ID NO: 126540 - protein, 9 aa, Homo sapiens
PPQSPQGAS

SEQ ID NO: 126541 - protein, 9 aa, Homo sapiens
PQSPQGASA

SEQ ID NO: 126542 - protein, 9 aa, Homo sapiens
QSPQGASAF

SEQ ID NO: 126543 - protein, 9 aa, Homo sapiens
SPQGASAFP

SEQ ID NO: 126544 - protein, 9 aa, Homo sapiens
PQGASAFPT

SEQ ID NO: 126545 - protein, 9 aa, Homo sapiens
QGASAFPTT

SEQ ID NO: 126546 - protein, 9 aa, Homo sapiens
GASAFPTTI

SEQ ID NO: 126547 - protein, 9 aa, Homo sapiens
ASAFPTTIN

SEQ ID NO: 126548 - protein, 9 aa, Homo sapiens
SAFPTTINF

SEQ ID NO: 126549 - protein, 9 aa, Homo sapiens
AFPTTINFT

SEQ ID NO: 126550 - protein, 9 aa, Homo sapiens
FPTTINFTR

SEQ ID NO: 126551 - protein, 9 aa, Homo sapiens
PTTINFTRQ

SEQ ID NO: 126552 - protein, 9 aa, Homo sapiens
TTINFTRQR

SEQ ID NO: 126553 - protein, 9 aa, Homo sapiens
TINFTRQRQ

SEQ ID NO: 126554 - protein, 9 aa, Homo sapiens
INFTRQRQP

SEQ ID NO: 126555 - protein, 9 aa, Homo sapiens
NFTRQRQPS

SEQ ID NO: 126556 - protein, 9 aa, Homo sapiens
FTRQRQPSE

SEQ ID NO: 126557 - protein, 9 aa, Homo sapiens
TRQRQPSEG

SEQ ID NO: 126558 - protein, 9 aa, Homo sapiens
RQRQPSEGS

SEQ ID NO: 126559 - protein, 9 aa, Homo sapiens
QRQPSEGSS

SEQ ID NO: 126560 - protein, 9 aa, Homo sapiens
RQPSEGSSS

SEQ ID NO: 126561 - protein, 9 aa, Homo sapiens
QPSEGSSSR

SEQ ID NO: 126562 - protein, 9 aa, Homo sapiens
PSEGSSSRE

SEQ ID NO: 126563 - protein, 9 aa, Homo sapiens
SEGSSSREE

SEQ ID NO: 126564 - protein, 9 aa, Homo sapiens
EGSSSREEE

SEQ ID NO: 126565 - protein, 9 aa, Homo sapiens
GSSSREEEG

SEQ ID NO: 126566 - protein, 9 aa, Homo sapiens
SSSREEEGP

SEQ ID NO: 126567 - protein, 9 aa, Homo sapiens
SSREEEGPS

SEQ ID NO: 126568 - protein, 9 aa, Homo sapiens
SREEEGPST

SEQ ID NO: 126569 - protein, 9 aa, Homo sapiens
REEEGPSTS

SEQ ID NO: 126570 - protein, 9 aa, Homo sapiens
EEEGPSTSC

SEQ ID NO: 126571 - protein, 9 aa, Homo sapiens
EEGPSTSCI

SEQ ID NO: 126572 - protein, 9 aa, Homo sapiens
EGPSTSCIL

SEQ ID NO: 126573 - protein, 9 aa, Homo sapiens
GPSTSCILE

SEQ ID NO: 126574 - protein, 9 aa, Homo sapiens
PSTSCILES

SEQ ID NO: 126575 - protein, 9 aa, Homo sapiens
STSCILESL

SEQ ID NO: 126576 - protein, 9 aa, Homo sapiens
TSCILESLF

SEQ ID NO: 126577 - protein, 9 aa, Homo sapiens
SCILESLFR

SEQ ID NO: 126578 - protein, 9 aa, Homo sapiens
CILESLFRA

SEQ ID NO: 126579 - protein, 9 aa, Homo sapiens
ILESLFRAV

SEQ ID NO: 126580 - protein, 9 aa, Homo sapiens
LESLFRAVI

SEQ ID NO: 126581 - protein, 9 aa, Homo sapiens
ESLFRAVIT

SEQ ID NO: 126582 - protein, 9 aa, Homo sapiens
SLFRAVITK

SEQ ID NO: 126583 - protein, 9 aa, Homo sapiens
LFRAVITKK

SEQ ID NO: 126584 - protein, 9 aa, Homo sapiens
FRAVITKKV

SEQ ID NO: 126585 - protein, 9 aa, Homo sapiens
RAVITKKVA

SEQ ID NO: 126586 - protein, 9 aa, Homo sapiens
AVITKKVAD

SEQ ID NO: 126587 - protein, 9 aa, Homo sapiens
VITKKVADL

SEQ ID NO: 126588 - protein, 9 aa, Homo sapiens
ITKKVADLV

SEQ ID NO: 126589 - protein, 9 aa, Homo sapiens
TKKVADLVG

SEQ ID NO: 126590 - protein, 9 aa, Homo sapiens
KKVADLVGF

SEQ ID NO: 126591 - protein, 9 aa, Homo sapiens
KVADLVGFL

SEQ ID NO: 126592 - protein, 9 aa, Homo sapiens
VADLVGFLL

SEQ ID NO: 126593 - protein, 9 aa, Homo sapiens
ADLVGFLLL

SEQ ID NO: 126594 - protein, 9 aa, Homo sapiens
DLVGFLLLK

SEQ ID NO: 126595 - protein, 9 aa, Homo sapiens
LVGFLLLKY

SEQ ID NO: 126596 - protein, 9 aa, Homo sapiens
VGFLLLKYR

SEQ ID NO: 126597 - protein, 9 aa, Homo sapiens
GFLLLKYRA

SEQ ID NO: 126598 - protein, 9 aa, Homo sapiens
FLLLKYRAR

SEQ ID NO: 126599 - protein, 9 aa, Homo sapiens
LLLKYRARE

SEQ ID NO: 126600 - protein, 9 aa, Homo sapiens
LLKYRAREP

SEQ ID NO: 126601 - protein, 9 aa, Homo sapiens
LKYRAREPV

SEQ ID NO: 126602 - protein, 9 aa, Homo sapiens
KYRAREPVT

SEQ ID NO: 126603 - protein, 9 aa, Homo sapiens
YRAREPVTK

SEQ ID NO: 126604 - protein, 9 aa, Homo sapiens
RAREPVTKA

SEQ ID NO: 126605 - protein, 9 aa, Homo sapiens
AREPVTKAE

SEQ ID NO: 126606 - protein, 9 aa, Homo sapiens
REPVTKAEM

SEQ ID NO: 126607 - protein, 9 aa, Homo sapiens
EPVTKAEML

SEQ ID NO: 126608 - protein, 9 aa, Homo sapiens
PVTKAEMLE

SEQ ID NO: 126609 - protein, 9 aa, Homo sapiens
VTKAEMLES

SEQ ID NO: 126610 - protein, 9 aa, Homo sapiens
TKAEMLESV

SEQ ID NO: 126611 - protein, 9 aa, Homo sapiens
KAEMLESVI

SEQ ID NO: 126612 - protein, 9 aa, Homo sapiens
AEMLESVIK

SEQ ID NO: 126613 - protein, 9 aa, Homo sapiens
EMLESVIKN

SEQ ID NO: 126614 - protein, 9 aa, Homo sapiens
MLESVIKNY

SEQ ID NO: 126615 - protein, 9 aa, Homo sapiens
LESVIKNYK

SEQ ID NO: 126616 - protein, 9 aa, Homo sapiens
ESVIKNYKH

SEQ ID NO: 126617 - protein, 9 aa, Homo sapiens
SVIKNYKHC

SEQ ID NO: 126618 - protein, 9 aa, Homo sapiens
VIKNYKHCF

SEQ ID NO: 126619 - protein, 9 aa, Homo sapiens
IKNYKHCFP

SEQ ID NO: 126620 - protein, 9 aa, Homo sapiens
KNYKHCFPE

SEQ ID NO: 126621 - protein, 9 aa, Homo sapiens
NYKHCFPEI

SEQ ID NO: 126622 - protein, 9 aa, Homo sapiens
YKHCFPEIF

SEQ ID NO: 126623 - protein, 9 aa, Homo sapiens
KHCFPEIFG

SEQ ID NO: 126624 - protein, 9 aa, Homo sapiens
HCFPEIFGK

SEQ ID NO: 126625 - protein, 9 aa, Homo sapiens
CFPEIFGKA

SEQ ID NO: 126626 - protein, 9 aa, Homo sapiens
FPEIFGKAS

SEQ ID NO: 126627 - protein, 9 aa, Homo sapiens
PEIFGKASE

SEQ ID NO: 126628 - protein, 9 aa, Homo sapiens
EIFGKASES

SEQ ID NO: 126629 - protein, 9 aa, Homo sapiens
IFGKASESL

SEQ ID NO: 126630 - protein, 9 aa, Homo sapiens
FGKASESLQ

SEQ ID NO: 126631 - protein, 9 aa, Homo sapiens
GKASESLQL

SEQ ID NO: 126632 - protein, 9 aa, Homo sapiens
KASESLQLV

SEQ ID NO: 126633 - protein, 9 aa, Homo sapiens
ASESLQLVF

SEQ ID NO: 126634 - protein, 9 aa, Homo sapiens
SESLQLVFG

SEQ ID NO: 126635 - protein, 9 aa, Homo sapiens
ESLQLVFGI

SEQ ID NO: 126636 - protein, 9 aa, Homo sapiens
SLQLVFGID

SEQ ID NO: 126637 - protein, 9 aa, Homo sapiens
LQLVFGIDV

SEQ ID NO: 126638 - protein, 9 aa, Homo sapiens
QLVFGIDVK

SEQ ID NO: 126639 - protein, 9 aa, Homo sapiens
LVFGIDVKE

SEQ ID NO: 126640 - protein, 9 aa, Homo sapiens
VFGIDVKEA

SEQ ID NO: 126641 - protein, 9 aa, Homo sapiens
FGIDVKEAD

SEQ ID NO: 126642 - protein, 9 aa, Homo sapiens
GIDVKEADP

SEQ ID NO: 126643 - protein, 9 aa, Homo sapiens
IDVKEADPT

SEQ ID NO: 126644 - protein, 9 aa, Homo sapiens
DVKEADPTG

SEQ ID NO: 126645 - protein, 9 aa, Homo sapiens
VKEADPTGH

SEQ ID NO: 126646 - protein, 9 aa, Homo sapiens
KEADPTGHS

SEQ ID NO: 126647 - protein, 9 aa, Homo sapiens
EADPTGHSY

SEQ ID NO: 126648 - protein, 9 aa, Homo sapiens
ADPTGHSYV

SEQ ID NO: 126649 - protein, 9 aa, Homo sapiens
DPTGHSYVL

SEQ ID NO: 126650 - protein, 9 aa, Homo sapiens
PTGHSYVLV

SEQ ID NO: 126651 - protein, 9 aa, Homo sapiens
TGHSYVLVT

SEQ ID NO: 126652 - protein, 9 aa, Homo sapiens
GHSYVLVTC

SEQ ID NO: 126653 - protein, 9 aa, Homo sapiens
HSYVLVTCL

SEQ ID NO: 126654 - protein, 9 aa, Homo sapiens
SYVLVTCLG

SEQ ID NO: 126655 - protein, 9 aa, Homo sapiens
YVLVTCLGL

SEQ ID NO: 126656 - protein, 9 aa, Homo sapiens
VLVTCLGLS

SEQ ID NO: 126657 - protein, 9 aa, Homo sapiens
LVTCLGLSY

SEQ ID NO: 126658 - protein, 9 aa, Homo sapiens
VTCLGLSYD

SEQ ID NO: 126659 - protein, 9 aa, Homo sapiens
TCLGLSYDG

SEQ ID NO: 126660 - protein, 9 aa, Homo sapiens
CLGLSYDGL

SEQ ID NO: 126661 - protein, 9 aa, Homo sapiens
LGLSYDGLL

SEQ ID NO: 126662 - protein, 9 aa, Homo sapiens
GLSYDGLLG

SEQ ID NO: 126663 - protein, 9 aa, Homo sapiens
LSYDGLLGD

SEQ ID NO: 126664 - protein, 9 aa, Homo sapiens
SYDGLLGDN

SEQ ID NO: 126665 - protein, 9 aa, Homo sapiens
YDGLLGDNQ

SEQ ID NO: 126666 - protein, 9 aa, Homo sapiens
DGLLGDNQI

SEQ ID NO: 126667 - protein, 9 aa, Homo sapiens
GLLGDNQIM

SEQ ID NO: 126668 - protein, 9 aa, Homo sapiens
LLGDNQIMP

SEQ ID NO: 126669 - protein, 9 aa, Homo sapiens
LGDNQIMPK

SEQ ID NO: 126670 - protein, 9 aa, Homo sapiens
GDNQIMPKT

SEQ ID NO: 126671 - protein, 9 aa, Homo sapiens
DNQIMPKTG

SEQ ID NO: 126672 - protein, 9 aa, Homo sapiens
NQIMPKTGF

SEQ ID NO: 126673 - protein, 9 aa, Homo sapiens
QIMPKTGFL

SEQ ID NO: 126674 - protein, 9 aa, Homo sapiens
IMPKTGFLI

SEQ ID NO: 126675 - protein, 9 aa, Homo sapiens
MPKTGFLII

SEQ ID NO: 126676 - protein, 9 aa, Homo sapiens
PKTGFLIIV

SEQ ID NO: 126677 - protein, 9 aa, Homo sapiens
KTGFLIIVL

SEQ ID NO: 126678 - protein, 9 aa, Homo sapiens
TGFLIIVLV

SEQ ID NO: 126679 - protein, 9 aa, Homo sapiens
GFLIIVLVM

SEQ ID NO: 126680 - protein, 9 aa, Homo sapiens
FLIIVLVMI

SEQ ID NO: 126681 - protein, 9 aa, Homo sapiens
LIIVLVMIA

SEQ ID NO: 126682 - protein, 9 aa, Homo sapiens
IIVLVMIAM

SEQ ID NO: 126683 - protein, 9 aa, Homo sapiens
IVLVMIAME

SEQ ID NO: 126684 - protein, 9 aa, Homo sapiens
VLVMIAMEG

SEQ ID NO: 126685 - protein, 9 aa, Homo sapiens
LVMIAMEGG

SEQ ID NO: 126686 - protein, 9 aa, Homo sapiens
VMIAMEGGH

SEQ ID NO: 126687 - protein, 9 aa, Homo sapiens
MIAMEGGHA

SEQ ID NO: 126688 - protein, 9 aa, Homo sapiens
IAMEGGHAP

SEQ ID NO: 126689 - protein, 9 aa, Homo sapiens
AMEGGHAPE

SEQ ID NO: 126690 - protein, 9 aa, Homo sapiens
MEGGHAPEE

SEQ ID NO: 126691 - protein, 9 aa, Homo sapiens
EGGHAPEEE

SEQ ID NO: 126692 - protein, 9 aa, Homo sapiens
GGHAPEEEI

SEQ ID NO: 126693 - protein, 9 aa, Homo sapiens
GHAPEEEIW

SEQ ID NO: 126694 - protein, 9 aa, Homo sapiens
HAPEEEIWE

SEQ ID NO: 126695 - protein, 9 aa, Homo sapiens
APEEEIWEE

SEQ ID NO: 126696 - protein, 9 aa, Homo sapiens
PEEEIWEEL

SEQ ID NO: 126697 - protein, 9 aa, Homo sapiens
EEEIWEELS

SEQ ID NO: 126698 - protein, 9 aa, Homo sapiens
EEIWEELSV

SEQ ID NO: 126699 - protein, 9 aa, Homo sapiens
EIWEELSVM

SEQ ID NO: 126700 - protein, 9 aa, Homo sapiens
IWEELSVME

SEQ ID NO: 126701 - protein, 9 aa, Homo sapiens
WEELSVMEV

SEQ ID NO: 126702 - protein, 9 aa, Homo sapiens
EELSVMEVY

SEQ ID NO: 126703 - protein, 9 aa, Homo sapiens
ELSVMEVYD

SEQ ID NO: 126704 - protein, 9 aa, Homo sapiens
LSVMEVYDG

SEQ ID NO: 126705 - protein, 9 aa, Homo sapiens
SVMEVYDGR

SEQ ID NO: 126706 - protein, 9 aa, Homo sapiens
VMEVYDGRE

SEQ ID NO: 126707 - protein, 9 aa, Homo sapiens
MEVYDGREH

SEQ ID NO: 126708 - protein, 9 aa, Homo sapiens
EVYDGREHS

SEQ ID NO: 126709 - protein, 9 aa, Homo sapiens
VYDGREHSA

SEQ ID NO: 126710 - protein, 9 aa, Homo sapiens
YDGREHSAY

SEQ ID NO: 126711 - protein, 9 aa, Homo sapiens
DGREHSAYG

SEQ ID NO: 126712 - protein, 9 aa, Homo sapiens
GREHSAYGE

SEQ ID NO: 126713 - protein, 9 aa, Homo sapiens
REHSAYGEP

SEQ ID NO: 126714 - protein, 9 aa, Homo sapiens
EHSAYGEPR

SEQ ID NO: 126715 - protein, 9 aa, Homo sapiens
HSAYGEPRK

SEQ ID NO: 126716 - protein, 9 aa, Homo sapiens
SAYGEPRKL

SEQ ID NO: 126717 - protein, 9 aa, Homo sapiens
AYGEPRKLL

SEQ ID NO: 126718 - protein, 9 aa, Homo sapiens
YGEPRKLLT

SEQ ID NO: 126719 - protein, 9 aa, Homo sapiens
GEPRKLLTQ

SEQ ID NO: 126720 - protein, 9 aa, Homo sapiens
EPRKLLTQD

SEQ ID NO: 126721 - protein, 9 aa, Homo sapiens
PRKLLTQDL

SEQ ID NO: 126722 - protein, 9 aa, Homo sapiens
RKLLTQDLV

SEQ ID NO: 126723 - protein, 9 aa, Homo sapiens
KLLTQDLVQ

SEQ ID NO: 126724 - protein, 9 aa, Homo sapiens
LLTQDLVQE

SEQ ID NO: 126725 - protein, 9 aa, Homo sapiens
LTQDLVQEK

SEQ ID NO: 126726 - protein, 9 aa, Homo sapiens
TQDLVQEKY

SEQ ID NO: 126727 - protein, 9 aa, Homo sapiens
QDLVQEKYL

SEQ ID NO: 126728 - protein, 9 aa, Homo sapiens
DLVQEKYLE

SEQ ID NO: 126729 - protein, 9 aa, Homo sapiens
LVQEKYLEY

SEQ ID NO: 126730 - protein, 9 aa, Homo sapiens
VQEKYLEYR

SEQ ID NO: 126731 - protein, 9 aa, Homo sapiens
QEKYLEYRQ

SEQ ID NO: 126732 - protein, 9 aa, Homo sapiens
EKYLEYRQV

SEQ ID NO: 126733 - protein, 9 aa, Homo sapiens
KYLEYRQVP

SEQ ID NO: 126734 - protein, 9 aa, Homo sapiens
YLEYRQVPD

SEQ ID NO: 126735 - protein, 9 aa, Homo sapiens
LEYRQVPDS

SEQ ID NO: 126736 - protein, 9 aa, Homo sapiens
EYRQVPDSD

SEQ ID NO: 126737 - protein, 9 aa, Homo sapiens
YRQVPDSDP

SEQ ID NO: 126738 - protein, 9 aa, Homo sapiens
RQVPDSDPA

SEQ ID NO: 126739 - protein, 9 aa, Homo sapiens
QVPDSDPAR

SEQ ID NO: 126740 - protein, 9 aa, Homo sapiens
VPDSDPARY

SEQ ID NO: 126741 - protein, 9 aa, Homo sapiens
PDSDPARYE

SEQ ID NO: 126742 - protein, 9 aa, Homo sapiens
DSDPARYEF

SEQ ID NO: 126743 - protein, 9 aa, Homo sapiens
SDPARYEFL

SEQ ID NO: 126744 - protein, 9 aa, Homo sapiens
DPARYEFLW

SEQ ID NO: 126745 - protein, 9 aa, Homo sapiens
PARYEFLWG

SEQ ID NO: 126746 - protein, 9 aa, Homo sapiens
ARYEFLWGP

SEQ ID NO: 126747 - protein, 9 aa, Homo sapiens
RYEFLWGPR

SEQ ID NO: 126748 - protein, 9 aa, Homo sapiens
YEFLWGPRA

SEQ ID NO: 126749 - protein, 9 aa, Homo sapiens
EFLWGPRAL

SEQ ID NO: 126750 - protein, 9 aa, Homo sapiens
FLWGPRALA

SEQ ID NO: 126751 - protein, 9 aa, Homo sapiens
LWGPRALAE

SEQ ID NO: 126752 - protein, 9 aa, Homo sapiens
WGPRALAET

SEQ ID NO: 126753 - protein, 9 aa, Homo sapiens
GPRALAETS

SEQ ID NO: 126754 - protein, 9 aa, Homo sapiens
PRALAETSY

SEQ ID NO: 126755 - protein, 9 aa, Homo sapiens
RALAETSYV

SEQ ID NO: 126756 - protein, 9 aa, Homo sapiens
ALAETSYVK

SEQ ID NO: 126757 - protein, 9 aa, Homo sapiens
LAETSYVKV

SEQ ID NO: 126758 - protein, 9 aa, Homo sapiens
AETSYVKVL

SEQ ID NO: 126759 - protein, 9 aa, Homo sapiens
ETSYVKVLE

SEQ ID NO: 126760 - protein, 9 aa, Homo sapiens
TSYVKVLEY

SEQ ID NO: 126761 - protein, 9 aa, Homo sapiens
SYVKVLEYV

SEQ ID NO: 126762 - protein, 9 aa, Homo sapiens
YVKVLEYVI

SEQ ID NO: 126763 - protein, 9 aa, Homo sapiens
VKVLEYVIK

SEQ ID NO: 126764 - protein, 9 aa, Homo sapiens
KVLEYVIKV

SEQ ID NO: 126765 - protein, 9 aa, Homo sapiens
VLEYVIKVS

SEQ ID NO: 126766 - protein, 9 aa, Homo sapiens
LEYVIKVSA

SEQ ID NO: 126767 - protein, 9 aa, Homo sapiens
EYVIKVSAR

SEQ ID NO: 126768 - protein, 9 aa, Homo sapiens
YVIKVSARV

SEQ ID NO: 126769 - protein, 9 aa, Homo sapiens
VIKVSARVR

SEQ ID NO: 126770 - protein, 9 aa, Homo sapiens
IKVSARVRF

SEQ ID NO: 126771 - protein, 9 aa, Homo sapiens
KVSARVRFF

SEQ ID NO: 126772 - protein, 9 aa, Homo sapiens
VSARVRFFF

SEQ ID NO: 126773 - protein, 9 aa, Homo sapiens
SARVRFFFP

SEQ ID NO: 126774 - protein, 9 aa, Homo sapiens
ARVRFFFPS

SEQ ID NO: 126775 - protein, 9 aa, Homo sapiens
RVRFFFPSL

SEQ ID NO: 126776 - protein, 9 aa, Homo sapiens
VRFFFPSLR

SEQ ID NO: 126777 - protein, 9 aa, Homo sapiens
RFFFPSLRE

SEQ ID NO: 126778 - protein, 9 aa, Homo sapiens
FFFPSLREA

SEQ ID NO: 126779 - protein, 9 aa, Homo sapiens
FFPSLREAA

SEQ ID NO: 126780 - protein, 9 aa, Homo sapiens
FPSLREAAL

SEQ ID NO: 126781 - protein, 9 aa, Homo sapiens
PSLREAALR

SEQ ID NO: 126782 - protein, 9 aa, Homo sapiens
SLREAALRE

SEQ ID NO: 126783 - protein, 9 aa, Homo sapiens
LREAALREE

SEQ ID NO: 126784 - protein, 9 aa, Homo sapiens
REAALREEE

SEQ ID NO: 126785 - protein, 9 aa, Homo sapiens
EAALREEEE

SEQ ID NO: 126786 - protein, 9 aa, Homo sapiens
AALREEEEG

SEQ ID NO: 126787 - protein, 9 aa, Homo sapiens
ALREEEEGV

SEQ ID NO: 126788 - protein, 9 aa, Homo sapiens
MPLEQRSQH

SEQ ID NO: 126789 - protein, 9 aa, Homo sapiens
PLEQRSQHC

SEQ ID NO: 126790 - protein, 9 aa, Homo sapiens
LEQRSQHCK

SEQ ID NO: 126791 - protein, 9 aa, Homo sapiens
EQRSQHCKP

SEQ ID NO: 126792 - protein, 9 aa, Homo sapiens
QRSQHCKPE

SEQ ID NO: 126793 - protein, 9 aa, Homo sapiens
RSQHCKPEE

SEQ ID NO: 126794 - protein, 9 aa, Homo sapiens
SQHCKPEEG

SEQ ID NO: 126795 - protein, 9 aa, Homo sapiens
QHCKPEEGL

SEQ ID NO: 126796 - protein, 9 aa, Homo sapiens
HCKPEEGLE

SEQ ID NO: 126797 - protein, 9 aa, Homo sapiens
CKPEEGLEA

SEQ ID NO: 126798 - protein, 9 aa, Homo sapiens
KPEEGLEAR

SEQ ID NO: 126799 - protein, 9 aa, Homo sapiens
PEEGLEARG

SEQ ID NO: 126800 - protein, 9 aa, Homo sapiens
EEGLEARGE

SEQ ID NO: 126801 - protein, 9 aa, Homo sapiens
EGLEARGEA

SEQ ID NO: 126802 - protein, 9 aa, Homo sapiens
GLEARGEAL

SEQ ID NO: 126803 - protein, 9 aa, Homo sapiens
LEARGEALG

SEQ ID NO: 126804 - protein, 9 aa, Homo sapiens
EARGEALGL

SEQ ID NO: 126805 - protein, 9 aa, Homo sapiens
ARGEALGLV

SEQ ID NO: 126806 - protein, 9 aa, Homo sapiens
RGEALGLVG

SEQ ID NO: 126807 - protein, 9 aa, Homo sapiens
GEALGLVGA

SEQ ID NO: 126808 - protein, 9 aa, Homo sapiens
EALGLVGAQ

SEQ ID NO: 126809 - protein, 9 aa, Homo sapiens
ALGLVGAQA

SEQ ID NO: 126810 - protein, 9 aa, Homo sapiens
LGLVGAQAP

SEQ ID NO: 126811 - protein, 9 aa, Homo sapiens
GLVGAQAPA

SEQ ID NO: 126812 - protein, 9 aa, Homo sapiens
LVGAQAPAT

SEQ ID NO: 126813 - protein, 9 aa, Homo sapiens
VGAQAPATE

SEQ ID NO: 126814 - protein, 9 aa, Homo sapiens
GAQAPATEE

SEQ ID NO: 126815 - protein, 9 aa, Homo sapiens
AQAPATEEQ

SEQ ID NO: 126816 - protein, 9 aa, Homo sapiens
QAPATEEQQ

SEQ ID NO: 126817 - protein, 9 aa, Homo sapiens
APATEEQQT

SEQ ID NO: 126818 - protein, 9 aa, Homo sapiens
PATEEQQTA

SEQ ID NO: 126819 - protein, 9 aa, Homo sapiens
ATEEQQTAS

SEQ ID NO: 126820 - protein, 9 aa, Homo sapiens
TEEQQTASS

SEQ ID NO: 126821 - protein, 9 aa, Homo sapiens
EEQQTASSS

SEQ ID NO: 126822 - protein, 9 aa, Homo sapiens
EQQTASSSS

SEQ ID NO: 126823 - protein, 9 aa, Homo sapiens
QQTASSSST

SEQ ID NO: 126824 - protein, 9 aa, Homo sapiens
QTASSSSTL

SEQ ID NO: 126825 - protein, 9 aa, Homo sapiens
TASSSSTLV

SEQ ID NO: 126826 - protein, 9 aa, Homo sapiens
ASSSSTLVE

SEQ ID NO: 126827 - protein, 9 aa, Homo sapiens
SSSSTLVEV

SEQ ID NO: 126828 - protein, 9 aa, Homo sapiens
SSSTLVEVT

SEQ ID NO: 126829 - protein, 9 aa, Homo sapiens
SSTLVEVTL

SEQ ID NO: 126830 - protein, 9 aa, Homo sapiens
STLVEVTLG

SEQ ID NO: 126831 - protein, 9 aa, Homo sapiens
TLVEVTLGE

SEQ ID NO: 126832 - protein, 9 aa, Homo sapiens
LVEVTLGEV

SEQ ID NO: 126833 - protein, 9 aa, Homo sapiens
VEVTLGEVP

SEQ ID NO: 126834 - protein, 9 aa, Homo sapiens
EVTLGEVPA

SEQ ID NO: 126835 - protein, 9 aa, Homo sapiens
VTLGEVPAA

SEQ ID NO: 126836 - protein, 9 aa, Homo sapiens
TLGEVPAAD

SEQ ID NO: 126837 - protein, 9 aa, Homo sapiens
LGEVPAADS

SEQ ID NO: 126838 - protein, 9 aa, Homo sapiens
GEVPAADSP

SEQ ID NO: 126839 - protein, 9 aa, Homo sapiens
EVPAADSPS

SEQ ID NO: 126840 - protein, 9 aa, Homo sapiens
VPAADSPSP

SEQ ID NO: 126841 - protein, 9 aa, Homo sapiens
PAADSPSPP

SEQ ID NO: 126842 - protein, 9 aa, Homo sapiens
AADSPSPPH

SEQ ID NO: 126843 - protein, 9 aa, Homo sapiens
ADSPSPPHS

SEQ ID NO: 126844 - protein, 9 aa, Homo sapiens
DSPSPPHSP

SEQ ID NO: 126845 - protein, 9 aa, Homo sapiens
SPSPPHSPQ

SEQ ID NO: 126846 - protein, 9 aa, Homo sapiens
PSPPHSPQG

SEQ ID NO: 126847 - protein, 9 aa, Homo sapiens
SPPHSPQGA

SEQ ID NO: 126848 - protein, 9 aa, Homo sapiens
PPHSPQGAS

SEQ ID NO: 126849 - protein, 9 aa, Homo sapiens
PHSPQGASS

SEQ ID NO: 126850 - protein, 9 aa, Homo sapiens
HSPQGASSF

SEQ ID NO: 126851 - protein, 9 aa, Homo sapiens
SPQGASSFS

SEQ ID NO: 126852 - protein, 9 aa, Homo sapiens
PQGASSFST

SEQ ID NO: 126853 - protein, 9 aa, Homo sapiens
QGASSFSTT

SEQ ID NO: 126854 - protein, 9 aa, Homo sapiens
GASSFSTTI

SEQ ID NO: 126855 - protein, 9 aa, Homo sapiens
ASSFSTTIN

SEQ ID NO: 126856 - protein, 9 aa, Homo sapiens
SSFSTTINY

SEQ ID NO: 126857 - protein, 9 aa, Homo sapiens
SFSTTINYT

SEQ ID NO: 126858 - protein, 9 aa, Homo sapiens
FSTTINYTL

SEQ ID NO: 126859 - protein, 9 aa, Homo sapiens
STTINYTLW

SEQ ID NO: 126860 - protein, 9 aa, Homo sapiens
TTINYTLWR

SEQ ID NO: 126861 - protein, 9 aa, Homo sapiens
TINYTLWRQ

SEQ ID NO: 126862 - protein, 9 aa, Homo sapiens
INYTLWRQS

SEQ ID NO: 126863 - protein, 9 aa, Homo sapiens
NYTLWRQSD

SEQ ID NO: 126864 - protein, 9 aa, Homo sapiens
YTLWRQSDE

SEQ ID NO: 126865 - protein, 9 aa, Homo sapiens
TLWRQSDEG

SEQ ID NO: 126866 - protein, 9 aa, Homo sapiens
LWRQSDEGS

SEQ ID NO: 126867 - protein, 9 aa, Homo sapiens
WRQSDEGSS

SEQ ID NO: 126868 - protein, 9 aa, Homo sapiens
RQSDEGSSN

SEQ ID NO: 126869 - protein, 9 aa, Homo sapiens
QSDEGSSNQ

SEQ ID NO: 126870 - protein, 9 aa, Homo sapiens
SDEGSSNQE

SEQ ID NO: 126871 - protein, 9 aa, Homo sapiens
DEGSSNQEE

SEQ ID NO: 126872 - protein, 9 aa, Homo sapiens
EGSSNQEEE

SEQ ID NO: 126873 - protein, 9 aa, Homo sapiens
GSSNQEEEG

SEQ ID NO: 126874 - protein, 9 aa, Homo sapiens
SSNQEEEGP

SEQ ID NO: 126875 - protein, 9 aa, Homo sapiens
SNQEEEGPR

SEQ ID NO: 126876 - protein, 9 aa, Homo sapiens
NQEEEGPRM

SEQ ID NO: 126877 - protein, 9 aa, Homo sapiens
QEEEGPRMF

SEQ ID NO: 126878 - protein, 9 aa, Homo sapiens
EEEGPRMFP

SEQ ID NO: 126879 - protein, 9 aa, Homo sapiens
EEGPRMFPD

SEQ ID NO: 126880 - protein, 9 aa, Homo sapiens
EGPRMFPDL

SEQ ID NO: 126881 - protein, 9 aa, Homo sapiens
GPRMFPDLE

SEQ ID NO: 126882 - protein, 9 aa, Homo sapiens
PRMFPDLES

SEQ ID NO: 126883 - protein, 9 aa, Homo sapiens
RMFPDLESE

SEQ ID NO: 126884 - protein, 9 aa, Homo sapiens
MFPDLESEF

SEQ ID NO: 126885 - protein, 9 aa, Homo sapiens
FPDLESEFQ

SEQ ID NO: 126886 - protein, 9 aa, Homo sapiens
PDLESEFQA

SEQ ID NO: 126887 - protein, 9 aa, Homo sapiens
DLESEFQAA

SEQ ID NO: 126888 - protein, 9 aa, Homo sapiens
LESEFQAAI

SEQ ID NO: 126889 - protein, 9 aa, Homo sapiens
ESEFQAAIS

SEQ ID NO: 126890 - protein, 9 aa, Homo sapiens
SEFQAAISR

SEQ ID NO: 126891 - protein, 9 aa, Homo sapiens
EFQAAISRK

SEQ ID NO: 126892 - protein, 9 aa, Homo sapiens
FQAAISRKM

SEQ ID NO: 126893 - protein, 9 aa, Homo sapiens
QAAISRKMV

SEQ ID NO: 126894 - protein, 9 aa, Homo sapiens
AAISRKMVE

SEQ ID NO: 126895 - protein, 9 aa, Homo sapiens
AISRKMVEL

SEQ ID NO: 126896 - protein, 9 aa, Homo sapiens
ISRKMVELV

SEQ ID NO: 126897 - protein, 9 aa, Homo sapiens
SRKMVELVH

SEQ ID NO: 126898 - protein, 9 aa, Homo sapiens
RKMVELVHF

SEQ ID NO: 126899 - protein, 9 aa, Homo sapiens
KMVELVHFL

SEQ ID NO: 126900 - protein, 9 aa, Homo sapiens
MVELVHFLL

SEQ ID NO: 126901 - protein, 9 aa, Homo sapiens
VELVHFLLL

SEQ ID NO: 126902 - protein, 9 aa, Homo sapiens
ELVHFLLLK

SEQ ID NO: 126903 - protein, 9 aa, Homo sapiens
LVHFLLLKY

SEQ ID NO: 126904 - protein, 9 aa, Homo sapiens
VHFLLLKYR

SEQ ID NO: 126905 - protein, 9 aa, Homo sapiens
HFLLLKYRA

SEQ ID NO: 126906 - protein, 9 aa, Homo sapiens
FLLLKYRAR

SEQ ID NO: 126907 - protein, 9 aa, Homo sapiens
LLLKYRARE

SEQ ID NO: 126908 - protein, 9 aa, Homo sapiens
LLKYRAREP

SEQ ID NO: 126909 - protein, 9 aa, Homo sapiens
LKYRAREPV

SEQ ID NO: 126910 - protein, 9 aa, Homo sapiens
KYRAREPVT

SEQ ID NO: 126911 - protein, 9 aa, Homo sapiens
YRAREPVTK

SEQ ID NO: 126912 - protein, 9 aa, Homo sapiens
RAREPVTKA

SEQ ID NO: 126913 - protein, 9 aa, Homo sapiens
AREPVTKAE

SEQ ID NO: 126914 - protein, 9 aa, Homo sapiens
REPVTKAEM

SEQ ID NO: 126915 - protein, 9 aa, Homo sapiens
EPVTKAEML

SEQ ID NO: 126916 - protein, 9 aa, Homo sapiens
PVTKAEMLE

SEQ ID NO: 126917 - protein, 9 aa, Homo sapiens
VTKAEMLES

SEQ ID NO: 126918 - protein, 9 aa, Homo sapiens
TKAEMLESV

SEQ ID NO: 126919 - protein, 9 aa, Homo sapiens
KAEMLESVL

SEQ ID NO: 126920 - protein, 9 aa, Homo sapiens
AEMLESVLR

SEQ ID NO: 126921 - protein, 9 aa, Homo sapiens
EMLESVLRN

SEQ ID NO: 126922 - protein, 9 aa, Homo sapiens
MLESVLRNC

SEQ ID NO: 126923 - protein, 9 aa, Homo sapiens
LESVLRNCQ

SEQ ID NO: 126924 - protein, 9 aa, Homo sapiens
ESVLRNCQD

SEQ ID NO: 126925 - protein, 9 aa, Homo sapiens
SVLRNCQDF

SEQ ID NO: 126926 - protein, 9 aa, Homo sapiens
VLRNCQDFF

SEQ ID NO: 126927 - protein, 9 aa, Homo sapiens
LRNCQDFFP

SEQ ID NO: 126928 - protein, 9 aa, Homo sapiens
RNCQDFFPV

SEQ ID NO: 126929 - protein, 9 aa, Homo sapiens
NCQDFFPVI

SEQ ID NO: 126930 - protein, 9 aa, Homo sapiens
CQDFFPVIF

SEQ ID NO: 126931 - protein, 9 aa, Homo sapiens
QDFFPVIFS

SEQ ID NO: 126932 - protein, 9 aa, Homo sapiens
DFFPVIFSK

SEQ ID NO: 126933 - protein, 9 aa, Homo sapiens
FFPVIFSKA

SEQ ID NO: 126934 - protein, 9 aa, Homo sapiens
FPVIFSKAS

SEQ ID NO: 126935 - protein, 9 aa, Homo sapiens
PVIFSKASE

SEQ ID NO: 126936 - protein, 9 aa, Homo sapiens
VIFSKASEY

SEQ ID NO: 126937 - protein, 9 aa, Homo sapiens
IFSKASEYL

SEQ ID NO: 126938 - protein, 9 aa, Homo sapiens
FSKASEYLQ

SEQ ID NO: 126939 - protein, 9 aa, Homo sapiens
SKASEYLQL

SEQ ID NO: 126940 - protein, 9 aa, Homo sapiens
KASEYLQLV

SEQ ID NO: 126941 - protein, 9 aa, Homo sapiens
ASEYLQLVF

SEQ ID NO: 126942 - protein, 9 aa, Homo sapiens
SEYLQLVFG

SEQ ID NO: 126943 - protein, 9 aa, Homo sapiens
EYLQLVFGI

SEQ ID NO: 126944 - protein, 9 aa, Homo sapiens
YLQLVFGIE

SEQ ID NO: 126945 - protein, 9 aa, Homo sapiens
LQLVFGIEV

SEQ ID NO: 126946 - protein, 9 aa, Homo sapiens
QLVFGIEVV

SEQ ID NO: 126947 - protein, 9 aa, Homo sapiens
LVFGIEVVE

SEQ ID NO: 126948 - protein, 9 aa, Homo sapiens
VFGIEVVEV

SEQ ID NO: 126949 - protein, 9 aa, Homo sapiens
FGIEVVEVV

SEQ ID NO: 126950 - protein, 9 aa, Homo sapiens
GIEVVEVVP

SEQ ID NO: 126951 - protein, 9 aa, Homo sapiens
IEVVEVVPI

SEQ ID NO: 126952 - protein, 9 aa, Homo sapiens
EVVEVVPIS

SEQ ID NO: 126953 - protein, 9 aa, Homo sapiens
VVEVVPISH

SEQ ID NO: 126954 - protein, 9 aa, Homo sapiens
VEVVPISHL

SEQ ID NO: 126955 - protein, 9 aa, Homo sapiens
EVVPISHLY

SEQ ID NO: 126956 - protein, 9 aa, Homo sapiens
VVPISHLYI

SEQ ID NO: 126957 - protein, 9 aa, Homo sapiens
VPISHLYIL

SEQ ID NO: 126958 - protein, 9 aa, Homo sapiens
PISHLYILV

SEQ ID NO: 126959 - protein, 9 aa, Homo sapiens
ISHLYILVT

SEQ ID NO: 126960 - protein, 9 aa, Homo sapiens
SHLYILVTC

SEQ ID NO: 126961 - protein, 9 aa, Homo sapiens
HLYILVTCL

SEQ ID NO: 126962 - protein, 9 aa, Homo sapiens
LYILVTCLG

SEQ ID NO: 126963 - protein, 9 aa, Homo sapiens
YILVTCLGL

SEQ ID NO: 126964 - protein, 9 aa, Homo sapiens
ILVTCLGLS

SEQ ID NO: 126965 - protein, 9 aa, Homo sapiens
LVTCLGLSY

SEQ ID NO: 126966 - protein, 9 aa, Homo sapiens
VTCLGLSYD

SEQ ID NO: 126967 - protein, 9 aa, Homo sapiens
TCLGLSYDG

SEQ ID NO: 126968 - protein, 9 aa, Homo sapiens
CLGLSYDGL

SEQ ID NO: 126969 - protein, 9 aa, Homo sapiens
LGLSYDGLL

SEQ ID NO: 126970 - protein, 9 aa, Homo sapiens
GLSYDGLLG

SEQ ID NO: 126971 - protein, 9 aa, Homo sapiens
LSYDGLLGD

SEQ ID NO: 126972 - protein, 9 aa, Homo sapiens
SYDGLLGDN

SEQ ID NO: 126973 - protein, 9 aa, Homo sapiens
YDGLLGDNQ

SEQ ID NO: 126974 - protein, 9 aa, Homo sapiens
DGLLGDNQV

SEQ ID NO: 126975 - protein, 9 aa, Homo sapiens
GLLGDNQVM

SEQ ID NO: 126976 - protein, 9 aa, Homo sapiens
LLGDNQVMP

SEQ ID NO: 126977 - protein, 9 aa, Homo sapiens
LGDNQVMPK

SEQ ID NO: 126978 - protein, 9 aa, Homo sapiens
GDNQVMPKT

SEQ ID NO: 126979 - protein, 9 aa, Homo sapiens
DNQVMPKTG

SEQ ID NO: 126980 - protein, 9 aa, Homo sapiens
NQVMPKTGL

SEQ ID NO: 126981 - protein, 9 aa, Homo sapiens
QVMPKTGLL

SEQ ID NO: 126982 - protein, 9 aa, Homo sapiens
VMPKTGLLI

SEQ ID NO: 126983 - protein, 9 aa, Homo sapiens
MPKTGLLII

SEQ ID NO: 126984 - protein, 9 aa, Homo sapiens
PKTGLLIIV

SEQ ID NO: 126985 - protein, 9 aa, Homo sapiens
KTGLLIIVL

SEQ ID NO: 126986 - protein, 9 aa, Homo sapiens
TGLLIIVLA

SEQ ID NO: 126987 - protein, 9 aa, Homo sapiens
GLLIIVLAI

SEQ ID NO: 126988 - protein, 9 aa, Homo sapiens
LLIIVLAII

SEQ ID NO: 126989 - protein, 9 aa, Homo sapiens
LIIVLAIIA

SEQ ID NO: 126990 - protein, 9 aa, Homo sapiens
IIVLAIIAI

SEQ ID NO: 126991 - protein, 9 aa, Homo sapiens
IVLAIIAIE

SEQ ID NO: 126992 - protein, 9 aa, Homo sapiens
VLAIIAIEG

SEQ ID NO: 126993 - protein, 9 aa, Homo sapiens
LAIIAIEGD

SEQ ID NO: 126994 - protein, 9 aa, Homo sapiens
AIIAIEGDC

SEQ ID NO: 126995 - protein, 9 aa, Homo sapiens
IIAIEGDCA

SEQ ID NO: 126996 - protein, 9 aa, Homo sapiens
IAIEGDCAP

SEQ ID NO: 126997 - protein, 9 aa, Homo sapiens
AIEGDCAPE

SEQ ID NO: 126998 - protein, 9 aa, Homo sapiens
IEGDCAPEE

SEQ ID NO: 126999 - protein, 9 aa, Homo sapiens
EGDCAPEEK

SEQ ID NO: 127000 - protein, 9 aa, Homo sapiens
GDCAPEEKI

SEQ ID NO: 127001 - protein, 9 aa, Homo sapiens
DCAPEEKIW

SEQ ID NO: 127002 - protein, 9 aa, Homo sapiens
CAPEEKIWE

SEQ ID NO: 127003 - protein, 9 aa, Homo sapiens
APEEKIWEE

SEQ ID NO: 127004 - protein, 9 aa, Homo sapiens
PEEKIWEEL

SEQ ID NO: 127005 - protein, 9 aa, Homo sapiens
EEKIWEELS

SEQ ID NO: 127006 - protein, 9 aa, Homo sapiens
EKIWEELSM

SEQ ID NO: 127007 - protein, 9 aa, Homo sapiens
KIWEELSML

SEQ ID NO: 127008 - protein, 9 aa, Homo sapiens
IWEELSMLE

SEQ ID NO: 127009 - protein, 9 aa, Homo sapiens
WEELSMLEV

SEQ ID NO: 127010 - protein, 9 aa, Homo sapiens
EELSMLEVF

SEQ ID NO: 127011 - protein, 9 aa, Homo sapiens
ELSMLEVFE

SEQ ID NO: 127012 - protein, 9 aa, Homo sapiens
LSMLEVFEG

SEQ ID NO: 127013 - protein, 9 aa, Homo sapiens
SMLEVFEGR

SEQ ID NO: 127014 - protein, 9 aa, Homo sapiens
MLEVFEGRE

SEQ ID NO: 127015 - protein, 9 aa, Homo sapiens
LEVFEGRED

SEQ ID NO: 127016 - protein, 9 aa, Homo sapiens
EVFEGREDS

SEQ ID NO: 127017 - protein, 9 aa, Homo sapiens
VFEGREDSV

SEQ ID NO: 127018 - protein, 9 aa, Homo sapiens
FEGREDSVF

SEQ ID NO: 127019 - protein, 9 aa, Homo sapiens
EGREDSVFA

SEQ ID NO: 127020 - protein, 9 aa, Homo sapiens
GREDSVFAH

SEQ ID NO: 127021 - protein, 9 aa, Homo sapiens
REDSVFAHP

SEQ ID NO: 127022 - protein, 9 aa, Homo sapiens
EDSVFAHPR

SEQ ID NO: 127023 - protein, 9 aa, Homo sapiens
DSVFAHPRK

SEQ ID NO: 127024 - protein, 9 aa, Homo sapiens
SVFAHPRKL

SEQ ID NO: 127025 - protein, 9 aa, Homo sapiens
VFAHPRKLL

SEQ ID NO: 127026 - protein, 9 aa, Homo sapiens
FAHPRKLLM

SEQ ID NO: 127027 - protein, 9 aa, Homo sapiens
AHPRKLLMQ

SEQ ID NO: 127028 - protein, 9 aa, Homo sapiens
HPRKLLMQD

SEQ ID NO: 127029 - protein, 9 aa, Homo sapiens
PRKLLMQDL

SEQ ID NO: 127030 - protein, 9 aa, Homo sapiens
RKLLMQDLV

SEQ ID NO: 127031 - protein, 9 aa, Homo sapiens
KLLMQDLVQ

SEQ ID NO: 127032 - protein, 9 aa, Homo sapiens
LLMQDLVQE

SEQ ID NO: 127033 - protein, 9 aa, Homo sapiens
LMQDLVQEN

SEQ ID NO: 127034 - protein, 9 aa, Homo sapiens
MQDLVQENY

SEQ ID NO: 127035 - protein, 9 aa, Homo sapiens
QDLVQENYL

SEQ ID NO: 127036 - protein, 9 aa, Homo sapiens
DLVQENYLE

SEQ ID NO: 127037 - protein, 9 aa, Homo sapiens
LVQENYLEY

SEQ ID NO: 127038 - protein, 9 aa, Homo sapiens
VQENYLEYR

SEQ ID NO: 127039 - protein, 9 aa, Homo sapiens
QENYLEYRQ

SEQ ID NO: 127040 - protein, 9 aa, Homo sapiens
ENYLEYRQV

SEQ ID NO: 127041 - protein, 9 aa, Homo sapiens
NYLEYRQVP

SEQ ID NO: 127042 - protein, 9 aa, Homo sapiens
YLEYRQVPG

SEQ ID NO: 127043 - protein, 9 aa, Homo sapiens
LEYRQVPGS

SEQ ID NO: 127044 - protein, 9 aa, Homo sapiens
EYRQVPGSD

SEQ ID NO: 127045 - protein, 9 aa, Homo sapiens
YRQVPGSDP

SEQ ID NO: 127046 - protein, 9 aa, Homo sapiens
RQVPGSDPA

SEQ ID NO: 127047 - protein, 9 aa, Homo sapiens
QVPGSDPAC

SEQ ID NO: 127048 - protein, 9 aa, Homo sapiens
VPGSDPACY

SEQ ID NO: 127049 - protein, 9 aa, Homo sapiens
PGSDPACYE

SEQ ID NO: 127050 - protein, 9 aa, Homo sapiens
GSDPACYEF

SEQ ID NO: 127051 - protein, 9 aa, Homo sapiens
SDPACYEFL

SEQ ID NO: 127052 - protein, 9 aa, Homo sapiens
DPACYEFLW

SEQ ID NO: 127053 - protein, 9 aa, Homo sapiens
PACYEFLWG

SEQ ID NO: 127054 - protein, 9 aa, Homo sapiens
ACYEFLWGP

SEQ ID NO: 127055 - protein, 9 aa, Homo sapiens
CYEFLWGPR

SEQ ID NO: 127056 - protein, 9 aa, Homo sapiens
YEFLWGPRA

SEQ ID NO: 127057 - protein, 9 aa, Homo sapiens
EFLWGPRAL

SEQ ID NO: 127058 - protein, 9 aa, Homo sapiens
FLWGPRALI

SEQ ID NO: 127059 - protein, 9 aa, Homo sapiens
LWGPRALIE

SEQ ID NO: 127060 - protein, 9 aa, Homo sapiens
WGPRALIET

SEQ ID NO: 127061 - protein, 9 aa, Homo sapiens
GPRALIETS

SEQ ID NO: 127062 - protein, 9 aa, Homo sapiens
PRALIETSY

SEQ ID NO: 127063 - protein, 9 aa, Homo sapiens
RALIETSYV

SEQ ID NO: 127064 - protein, 9 aa, Homo sapiens
ALIETSYVK

SEQ ID NO: 127065 - protein, 9 aa, Homo sapiens
LIETSYVKV

SEQ ID NO: 127066 - protein, 9 aa, Homo sapiens
IETSYVKVL

SEQ ID NO: 127067 - protein, 9 aa, Homo sapiens
ETSYVKVLH

SEQ ID NO: 127068 - protein, 9 aa, Homo sapiens
TSYVKVLHH

SEQ ID NO: 127069 - protein, 9 aa, Homo sapiens
SYVKVLHHT

SEQ ID NO: 127070 - protein, 9 aa, Homo sapiens
YVKVLHHTL

SEQ ID NO: 127071 - protein, 9 aa, Homo sapiens
VKVLHHTLK

SEQ ID NO: 127072 - protein, 9 aa, Homo sapiens
KVLHHTLKI

SEQ ID NO: 127073 - protein, 9 aa, Homo sapiens
VLHHTLKIG

SEQ ID NO: 127074 - protein, 9 aa, Homo sapiens
LHHTLKIGG

SEQ ID NO: 127075 - protein, 9 aa, Homo sapiens
HHTLKIGGE

SEQ ID NO: 127076 - protein, 9 aa, Homo sapiens
HTLKIGGEP

SEQ ID NO: 127077 - protein, 9 aa, Homo sapiens
TLKIGGEPH

SEQ ID NO: 127078 - protein, 9 aa, Homo sapiens
LKIGGEPHI

SEQ ID NO: 127079 - protein, 9 aa, Homo sapiens
KIGGEPHIS

SEQ ID NO: 127080 - protein, 9 aa, Homo sapiens
IGGEPHISY

SEQ ID NO: 127081 - protein, 9 aa, Homo sapiens
GGEPHISYP

SEQ ID NO: 127082 - protein, 9 aa, Homo sapiens
GEPHISYPP

SEQ ID NO: 127083 - protein, 9 aa, Homo sapiens
EPHISYPPL

SEQ ID NO: 127084 - protein, 9 aa, Homo sapiens
PHISYPPLH

SEQ ID NO: 127085 - protein, 9 aa, Homo sapiens
HISYPPLHE

SEQ ID NO: 127086 - protein, 9 aa, Homo sapiens
ISYPPLHER

SEQ ID NO: 127087 - protein, 9 aa, Homo sapiens
SYPPLHERA

SEQ ID NO: 127088 - protein, 9 aa, Homo sapiens
YPPLHERAL

SEQ ID NO: 127089 - protein, 9 aa, Homo sapiens
PPLHERALR

SEQ ID NO: 127090 - protein, 9 aa, Homo sapiens
PLHERALRE

SEQ ID NO: 127091 - protein, 9 aa, Homo sapiens
LHERALREG

SEQ ID NO: 127092 - protein, 9 aa, Homo sapiens
HERALREGE

SEQ ID NO: 127093 - protein, 9 aa, Homo sapiens
ERALREGEE

SEQ ID NO: 127094 - protein, 9 aa, Homo sapiens
MPLEQRSQH

SEQ ID NO: 127095 - protein, 9 aa, Homo sapiens
PLEQRSQHC

SEQ ID NO: 127096 - protein, 9 aa, Homo sapiens
LEQRSQHCK

SEQ ID NO: 127097 - protein, 9 aa, Homo sapiens
EQRSQHCKP

SEQ ID NO: 127098 - protein, 9 aa, Homo sapiens
QRSQHCKPE

SEQ ID NO: 127099 - protein, 9 aa, Homo sapiens
RSQHCKPEE

SEQ ID NO: 127100 - protein, 9 aa, Homo sapiens
SQHCKPEEG

SEQ ID NO: 127101 - protein, 9 aa, Homo sapiens
QHCKPEEGL

SEQ ID NO: 127102 - protein, 9 aa, Homo sapiens
HCKPEEGLE

SEQ ID NO: 127103 - protein, 9 aa, Homo sapiens
CKPEEGLEA

SEQ ID NO: 127104 - protein, 9 aa, Homo sapiens
KPEEGLEAR

SEQ ID NO: 127105 - protein, 9 aa, Homo sapiens
PEEGLEARG

SEQ ID NO: 127106 - protein, 9 aa, Homo sapiens
EEGLEARGE

SEQ ID NO: 127107 - protein, 9 aa, Homo sapiens
EGLEARGEA

SEQ ID NO: 127108 - protein, 9 aa, Homo sapiens
GLEARGEAL

SEQ ID NO: 127109 - protein, 9 aa, Homo sapiens
LEARGEALG

SEQ ID NO: 127110 - protein, 9 aa, Homo sapiens
EARGEALGL

SEQ ID NO: 127111 - protein, 9 aa, Homo sapiens
ARGEALGLV

SEQ ID NO: 127112 - protein, 9 aa, Homo sapiens
RGEALGLVG

SEQ ID NO: 127113 - protein, 9 aa, Homo sapiens
GEALGLVGA

SEQ ID NO: 127114 - protein, 9 aa, Homo sapiens
EALGLVGAQ

SEQ ID NO: 127115 - protein, 9 aa, Homo sapiens
ALGLVGAQA

SEQ ID NO: 127116 - protein, 9 aa, Homo sapiens
LGLVGAQAP

SEQ ID NO: 127117 - protein, 9 aa, Homo sapiens
GLVGAQAPA

SEQ ID NO: 127118 - protein, 9 aa, Homo sapiens
LVGAQAPAT

SEQ ID NO: 127119 - protein, 9 aa, Homo sapiens
VGAQAPATE

SEQ ID NO: 127120 - protein, 9 aa, Homo sapiens
GAQAPATEE

SEQ ID NO: 127121 - protein, 9 aa, Homo sapiens
AQAPATEEQ

SEQ ID NO: 127122 - protein, 9 aa, Homo sapiens
QAPATEEQE

SEQ ID NO: 127123 - protein, 9 aa, Homo sapiens
APATEEQEA

SEQ ID NO: 127124 - protein, 9 aa, Homo sapiens
PATEEQEAA

SEQ ID NO: 127125 - protein, 9 aa, Homo sapiens
ATEEQEAAS

SEQ ID NO: 127126 - protein, 9 aa, Homo sapiens
TEEQEAASS

SEQ ID NO: 127127 - protein, 9 aa, Homo sapiens
EEQEAASSS

SEQ ID NO: 127128 - protein, 9 aa, Homo sapiens
EQEAASSSS

SEQ ID NO: 127129 - protein, 9 aa, Homo sapiens
QEAASSSST

SEQ ID NO: 127130 - protein, 9 aa, Homo sapiens
EAASSSSTL

SEQ ID NO: 127131 - protein, 9 aa, Homo sapiens
AASSSSTLV

SEQ ID NO: 127132 - protein, 9 aa, Homo sapiens
ASSSSTLVE

SEQ ID NO: 127133 - protein, 9 aa, Homo sapiens
SSSSTLVEV

SEQ ID NO: 127134 - protein, 9 aa, Homo sapiens
SSSTLVEVT

SEQ ID NO: 127135 - protein, 9 aa, Homo sapiens
SSTLVEVTL

SEQ ID NO: 127136 - protein, 9 aa, Homo sapiens
STLVEVTLG

SEQ ID NO: 127137 - protein, 9 aa, Homo sapiens
TLVEVTLGE

SEQ ID NO: 127138 - protein, 9 aa, Homo sapiens
LVEVTLGEV

SEQ ID NO: 127139 - protein, 9 aa, Homo sapiens
VEVTLGEVP

SEQ ID NO: 127140 - protein, 9 aa, Homo sapiens
EVTLGEVPA

SEQ ID NO: 127141 - protein, 9 aa, Homo sapiens
VTLGEVPAA

SEQ ID NO: 127142 - protein, 9 aa, Homo sapiens
TLGEVPAAE

SEQ ID NO: 127143 - protein, 9 aa, Homo sapiens
LGEVPAAES

SEQ ID NO: 127144 - protein, 9 aa, Homo sapiens
GEVPAAESP

SEQ ID NO: 127145 - protein, 9 aa, Homo sapiens
EVPAAESPD

SEQ ID NO: 127146 - protein, 9 aa, Homo sapiens
VPAAESPDP

SEQ ID NO: 127147 - protein, 9 aa, Homo sapiens
PAAESPDPP

SEQ ID NO: 127148 - protein, 9 aa, Homo sapiens
AAESPDPPQ

SEQ ID NO: 127149 - protein, 9 aa, Homo sapiens
AESPDPPQS

SEQ ID NO: 127150 - protein, 9 aa, Homo sapiens
ESPDPPQSP

SEQ ID NO: 127151 - protein, 9 aa, Homo sapiens
SPDPPQSPQ

SEQ ID NO: 127152 - protein, 9 aa, Homo sapiens
PDPPQSPQG

SEQ ID NO: 127153 - protein, 9 aa, Homo sapiens
DPPQSPQGA

SEQ ID NO: 127154 - protein, 9 aa, Homo sapiens
PPQSPQGAS

SEQ ID NO: 127155 - protein, 9 aa, Homo sapiens
PQSPQGASS

SEQ ID NO: 127156 - protein, 9 aa, Homo sapiens
QSPQGASSL

SEQ ID NO: 127157 - protein, 9 aa, Homo sapiens
SPQGASSLP

SEQ ID NO: 127158 - protein, 9 aa, Homo sapiens
PQGASSLPT

SEQ ID NO: 127159 - protein, 9 aa, Homo sapiens
QGASSLPTT

SEQ ID NO: 127160 - protein, 9 aa, Homo sapiens
GASSLPTTM

SEQ ID NO: 127161 - protein, 9 aa, Homo sapiens
ASSLPTTMN

SEQ ID NO: 127162 - protein, 9 aa, Homo sapiens
SSLPTTMNY

SEQ ID NO: 127163 - protein, 9 aa, Homo sapiens
SLPTTMNYP

SEQ ID NO: 127164 - protein, 9 aa, Homo sapiens
LPTTMNYPL

SEQ ID NO: 127165 - protein, 9 aa, Homo sapiens
PTTMNYPLW

SEQ ID NO: 127166 - protein, 9 aa, Homo sapiens
TTMNYPLWS

SEQ ID NO: 127167 - protein, 9 aa, Homo sapiens
TMNYPLWSQ

SEQ ID NO: 127168 - protein, 9 aa, Homo sapiens
MNYPLWSQS

SEQ ID NO: 127169 - protein, 9 aa, Homo sapiens
NYPLWSQSY

SEQ ID NO: 127170 - protein, 9 aa, Homo sapiens
YPLWSQSYE

SEQ ID NO: 127171 - protein, 9 aa, Homo sapiens
PLWSQSYED

SEQ ID NO: 127172 - protein, 9 aa, Homo sapiens
LWSQSYEDS

SEQ ID NO: 127173 - protein, 9 aa, Homo sapiens
WSQSYEDSS

SEQ ID NO: 127174 - protein, 9 aa, Homo sapiens
SQSYEDSSN

SEQ ID NO: 127175 - protein, 9 aa, Homo sapiens
QSYEDSSNQ

SEQ ID NO: 127176 - protein, 9 aa, Homo sapiens
SYEDSSNQE

SEQ ID NO: 127177 - protein, 9 aa, Homo sapiens
YEDSSNQEE

SEQ ID NO: 127178 - protein, 9 aa, Homo sapiens
EDSSNQEEE

SEQ ID NO: 127179 - protein, 9 aa, Homo sapiens
DSSNQEEEG

SEQ ID NO: 127180 - protein, 9 aa, Homo sapiens
SSNQEEEGP

SEQ ID NO: 127181 - protein, 9 aa, Homo sapiens
SNQEEEGPS

SEQ ID NO: 127182 - protein, 9 aa, Homo sapiens
NQEEEGPST

SEQ ID NO: 127183 - protein, 9 aa, Homo sapiens
QEEEGPSTF

SEQ ID NO: 127184 - protein, 9 aa, Homo sapiens
EEEGPSTFP

SEQ ID NO: 127185 - protein, 9 aa, Homo sapiens
EEGPSTFPD

SEQ ID NO: 127186 - protein, 9 aa, Homo sapiens
EGPSTFPDL

SEQ ID NO: 127187 - protein, 9 aa, Homo sapiens
GPSTFPDLE

SEQ ID NO: 127188 - protein, 9 aa, Homo sapiens
PSTFPDLES

SEQ ID NO: 127189 - protein, 9 aa, Homo sapiens
STFPDLESE

SEQ ID NO: 127190 - protein, 9 aa, Homo sapiens
TFPDLESEF

SEQ ID NO: 127191 - protein, 9 aa, Homo sapiens
FPDLESEFQ

SEQ ID NO: 127192 - protein, 9 aa, Homo sapiens
PDLESEFQA

SEQ ID NO: 127193 - protein, 9 aa, Homo sapiens
DLESEFQAA

SEQ ID NO: 127194 - protein, 9 aa, Homo sapiens
LESEFQAAL

SEQ ID NO: 127195 - protein, 9 aa, Homo sapiens
ESEFQAALS

SEQ ID NO: 127196 - protein, 9 aa, Homo sapiens
SEFQAALSR

SEQ ID NO: 127197 - protein, 9 aa, Homo sapiens
EFQAALSRK

SEQ ID NO: 127198 - protein, 9 aa, Homo sapiens
FQAALSRKV

SEQ ID NO: 127199 - protein, 9 aa, Homo sapiens
QAALSRKVA

SEQ ID NO: 127200 - protein, 9 aa, Homo sapiens
AALSRKVAE

SEQ ID NO: 127201 - protein, 9 aa, Homo sapiens
ALSRKVAEL

SEQ ID NO: 127202 - protein, 9 aa, Homo sapiens
LSRKVAELV

SEQ ID NO: 127203 - protein, 9 aa, Homo sapiens
SRKVAELVH

SEQ ID NO: 127204 - protein, 9 aa, Homo sapiens
RKVAELVHF

SEQ ID NO: 127205 - protein, 9 aa, Homo sapiens
KVAELVHFL

SEQ ID NO: 127206 - protein, 9 aa, Homo sapiens
VAELVHFLL

SEQ ID NO: 127207 - protein, 9 aa, Homo sapiens
AELVHFLLL

SEQ ID NO: 127208 - protein, 9 aa, Homo sapiens
ELVHFLLLK

SEQ ID NO: 127209 - protein, 9 aa, Homo sapiens
LVHFLLLKY

SEQ ID NO: 127210 - protein, 9 aa, Homo sapiens
VHFLLLKYR

SEQ ID NO: 127211 - protein, 9 aa, Homo sapiens
HFLLLKYRA

SEQ ID NO: 127212 - protein, 9 aa, Homo sapiens
FLLLKYRAR

SEQ ID NO: 127213 - protein, 9 aa, Homo sapiens
LLLKYRARE

SEQ ID NO: 127214 - protein, 9 aa, Homo sapiens
LLKYRAREP

SEQ ID NO: 127215 - protein, 9 aa, Homo sapiens
LKYRAREPV

SEQ ID NO: 127216 - protein, 9 aa, Homo sapiens
KYRAREPVT

SEQ ID NO: 127217 - protein, 9 aa, Homo sapiens
YRAREPVTK

SEQ ID NO: 127218 - protein, 9 aa, Homo sapiens
RAREPVTKA

SEQ ID NO: 127219 - protein, 9 aa, Homo sapiens
AREPVTKAE

SEQ ID NO: 127220 - protein, 9 aa, Homo sapiens
REPVTKAEM

SEQ ID NO: 127221 - protein, 9 aa, Homo sapiens
EPVTKAEML

SEQ ID NO: 127222 - protein, 9 aa, Homo sapiens
PVTKAEMLG

SEQ ID NO: 127223 - protein, 9 aa, Homo sapiens
VTKAEMLGS

SEQ ID NO: 127224 - protein, 9 aa, Homo sapiens
TKAEMLGSV

SEQ ID NO: 127225 - protein, 9 aa, Homo sapiens
KAEMLGSVV

SEQ ID NO: 127226 - protein, 9 aa, Homo sapiens
AEMLGSVVG

SEQ ID NO: 127227 - protein, 9 aa, Homo sapiens
EMLGSVVGN

SEQ ID NO: 127228 - protein, 9 aa, Homo sapiens
MLGSVVGNW

SEQ ID NO: 127229 - protein, 9 aa, Homo sapiens
LGSVVGNWQ

SEQ ID NO: 127230 - protein, 9 aa, Homo sapiens
GSVVGNWQY

SEQ ID NO: 127231 - protein, 9 aa, Homo sapiens
SVVGNWQYF

SEQ ID NO: 127232 - protein, 9 aa, Homo sapiens
VVGNWQYFF

SEQ ID NO: 127233 - protein, 9 aa, Homo sapiens
VGNWQYFFP

SEQ ID NO: 127234 - protein, 9 aa, Homo sapiens
GNWQYFFPV

SEQ ID NO: 127235 - protein, 9 aa, Homo sapiens
NWQYFFPVI

SEQ ID NO: 127236 - protein, 9 aa, Homo sapiens
WQYFFPVIF

SEQ ID NO: 127237 - protein, 9 aa, Homo sapiens
QYFFPVIFS

SEQ ID NO: 127238 - protein, 9 aa, Homo sapiens
YFFPVIFSK

SEQ ID NO: 127239 - protein, 9 aa, Homo sapiens
FFPVIFSKA

SEQ ID NO: 127240 - protein, 9 aa, Homo sapiens
FPVIFSKAS

SEQ ID NO: 127241 - protein, 9 aa, Homo sapiens
PVIFSKASS

SEQ ID NO: 127242 - protein, 9 aa, Homo sapiens
VIFSKASSS

SEQ ID NO: 127243 - protein, 9 aa, Homo sapiens
IFSKASSSL

SEQ ID NO: 127244 - protein, 9 aa, Homo sapiens
FSKASSSLQ

SEQ ID NO: 127245 - protein, 9 aa, Homo sapiens
SKASSSLQL

SEQ ID NO: 127246 - protein, 9 aa, Homo sapiens
KASSSLQLV

SEQ ID NO: 127247 - protein, 9 aa, Homo sapiens
ASSSLQLVF

SEQ ID NO: 127248 - protein, 9 aa, Homo sapiens
SSSLQLVFG

SEQ ID NO: 127249 - protein, 9 aa, Homo sapiens
SSLQLVFGI

SEQ ID NO: 127250 - protein, 9 aa, Homo sapiens
SLQLVFGIE

SEQ ID NO: 127251 - protein, 9 aa, Homo sapiens
LQLVFGIEL

SEQ ID NO: 127252 - protein, 9 aa, Homo sapiens
QLVFGIELM

SEQ ID NO: 127253 - protein, 9 aa, Homo sapiens
LVFGIELME

SEQ ID NO: 127254 - protein, 9 aa, Homo sapiens
VFGIELMEV

SEQ ID NO: 127255 - protein, 9 aa, Homo sapiens
FGIELMEVD

SEQ ID NO: 127256 - protein, 9 aa, Homo sapiens
GIELMEVDP

SEQ ID NO: 127257 - protein, 9 aa, Homo sapiens
IELMEVDPI

SEQ ID NO: 127258 - protein, 9 aa, Homo sapiens
ELMEVDPIG

SEQ ID NO: 127259 - protein, 9 aa, Homo sapiens
LMEVDPIGH

SEQ ID NO: 127260 - protein, 9 aa, Homo sapiens
MEVDPIGHL

SEQ ID NO: 127261 - protein, 9 aa, Homo sapiens
EVDPIGHLY

SEQ ID NO: 127262 - protein, 9 aa, Homo sapiens
VDPIGHLYI

SEQ ID NO: 127263 - protein, 9 aa, Homo sapiens
DPIGHLYIF

SEQ ID NO: 127264 - protein, 9 aa, Homo sapiens
PIGHLYIFA

SEQ ID NO: 127265 - protein, 9 aa, Homo sapiens
IGHLYIFAT

SEQ ID NO: 127266 - protein, 9 aa, Homo sapiens
GHLYIFATC

SEQ ID NO: 127267 - protein, 9 aa, Homo sapiens
HLYIFATCL

SEQ ID NO: 127268 - protein, 9 aa, Homo sapiens
LYIFATCLG

SEQ ID NO: 127269 - protein, 9 aa, Homo sapiens
YIFATCLGL

SEQ ID NO: 127270 - protein, 9 aa, Homo sapiens
IFATCLGLS

SEQ ID NO: 127271 - protein, 9 aa, Homo sapiens
FATCLGLSY

SEQ ID NO: 127272 - protein, 9 aa, Homo sapiens
ATCLGLSYD

SEQ ID NO: 127273 - protein, 9 aa, Homo sapiens
TCLGLSYDG

SEQ ID NO: 127274 - protein, 9 aa, Homo sapiens
CLGLSYDGL

SEQ ID NO: 127275 - protein, 9 aa, Homo sapiens
LGLSYDGLL

SEQ ID NO: 127276 - protein, 9 aa, Homo sapiens
GLSYDGLLG

SEQ ID NO: 127277 - protein, 9 aa, Homo sapiens
LSYDGLLGD

SEQ ID NO: 127278 - protein, 9 aa, Homo sapiens
SYDGLLGDN

SEQ ID NO: 127279 - protein, 9 aa, Homo sapiens
YDGLLGDNQ

SEQ ID NO: 127280 - protein, 9 aa, Homo sapiens
DGLLGDNQI

SEQ ID NO: 127281 - protein, 9 aa, Homo sapiens
GLLGDNQIM

SEQ ID NO: 127282 - protein, 9 aa, Homo sapiens
LLGDNQIMP

SEQ ID NO: 127283 - protein, 9 aa, Homo sapiens
LGDNQIMPK

SEQ ID NO: 127284 - protein, 9 aa, Homo sapiens
GDNQIMPKA

SEQ ID NO: 127285 - protein, 9 aa, Homo sapiens
DNQIMPKAG

SEQ ID NO: 127286 - protein, 9 aa, Homo sapiens
NQIMPKAGL

SEQ ID NO: 127287 - protein, 9 aa, Homo sapiens
QIMPKAGLL

SEQ ID NO: 127288 - protein, 9 aa, Homo sapiens
IMPKAGLLI

SEQ ID NO: 127289 - protein, 9 aa, Homo sapiens
MPKAGLLII

SEQ ID NO: 127290 - protein, 9 aa, Homo sapiens
PKAGLLIIV

SEQ ID NO: 127291 - protein, 9 aa, Homo sapiens
KAGLLIIVL

SEQ ID NO: 127292 - protein, 9 aa, Homo sapiens
AGLLIIVLA

SEQ ID NO: 127293 - protein, 9 aa, Homo sapiens
GLLIIVLAI

SEQ ID NO: 127294 - protein, 9 aa, Homo sapiens
LLIIVLAII

SEQ ID NO: 127295 - protein, 9 aa, Homo sapiens
LIIVLAIIA

SEQ ID NO: 127296 - protein, 9 aa, Homo sapiens
IIVLAIIAR

SEQ ID NO: 127297 - protein, 9 aa, Homo sapiens
IVLAIIARE

SEQ ID NO: 127298 - protein, 9 aa, Homo sapiens
VLAIIAREG

SEQ ID NO: 127299 - protein, 9 aa, Homo sapiens
LAIIAREGD

SEQ ID NO: 127300 - protein, 9 aa, Homo sapiens
AIIAREGDC

SEQ ID NO: 127301 - protein, 9 aa, Homo sapiens
IIAREGDCA

SEQ ID NO: 127302 - protein, 9 aa, Homo sapiens
IAREGDCAP

SEQ ID NO: 127303 - protein, 9 aa, Homo sapiens
AREGDCAPE

SEQ ID NO: 127304 - protein, 9 aa, Homo sapiens
REGDCAPEE

SEQ ID NO: 127305 - protein, 9 aa, Homo sapiens
EGDCAPEEK

SEQ ID NO: 127306 - protein, 9 aa, Homo sapiens
GDCAPEEKI

SEQ ID NO: 127307 - protein, 9 aa, Homo sapiens
DCAPEEKIW

SEQ ID NO: 127308 - protein, 9 aa, Homo sapiens
CAPEEKIWE

SEQ ID NO: 127309 - protein, 9 aa, Homo sapiens
APEEKIWEE

SEQ ID NO: 127310 - protein, 9 aa, Homo sapiens
PEEKIWEEL

SEQ ID NO: 127311 - protein, 9 aa, Homo sapiens
EEKIWEELS

SEQ ID NO: 127312 - protein, 9 aa, Homo sapiens
EKIWEELSV

SEQ ID NO: 127313 - protein, 9 aa, Homo sapiens
KIWEELSVL

SEQ ID NO: 127314 - protein, 9 aa, Homo sapiens
IWEELSVLE

SEQ ID NO: 127315 - protein, 9 aa, Homo sapiens
WEELSVLEV

SEQ ID NO: 127316 - protein, 9 aa, Homo sapiens
EELSVLEVF

SEQ ID NO: 127317 - protein, 9 aa, Homo sapiens
ELSVLEVFE

SEQ ID NO: 127318 - protein, 9 aa, Homo sapiens
LSVLEVFEG

SEQ ID NO: 127319 - protein, 9 aa, Homo sapiens
SVLEVFEGR

SEQ ID NO: 127320 - protein, 9 aa, Homo sapiens
VLEVFEGRE

SEQ ID NO: 127321 - protein, 9 aa, Homo sapiens
LEVFEGRED

SEQ ID NO: 127322 - protein, 9 aa, Homo sapiens
EVFEGREDS

SEQ ID NO: 127323 - protein, 9 aa, Homo sapiens
VFEGREDSI

SEQ ID NO: 127324 - protein, 9 aa, Homo sapiens
FEGREDSIL

SEQ ID NO: 127325 - protein, 9 aa, Homo sapiens
EGREDSILG

SEQ ID NO: 127326 - protein, 9 aa, Homo sapiens
GREDSILGD

SEQ ID NO: 127327 - protein, 9 aa, Homo sapiens
REDSILGDP

SEQ ID NO: 127328 - protein, 9 aa, Homo sapiens
EDSILGDPK

SEQ ID NO: 127329 - protein, 9 aa, Homo sapiens
DSILGDPKK

SEQ ID NO: 127330 - protein, 9 aa, Homo sapiens
SILGDPKKL

SEQ ID NO: 127331 - protein, 9 aa, Homo sapiens
ILGDPKKLL

SEQ ID NO: 127332 - protein, 9 aa, Homo sapiens
LGDPKKLLT

SEQ ID NO: 127333 - protein, 9 aa, Homo sapiens
GDPKKLLTQ

SEQ ID NO: 127334 - protein, 9 aa, Homo sapiens
DPKKLLTQH

SEQ ID NO: 127335 - protein, 9 aa, Homo sapiens
PKKLLTQHF

SEQ ID NO: 127336 - protein, 9 aa, Homo sapiens
KKLLTQHFV

SEQ ID NO: 127337 - protein, 9 aa, Homo sapiens
KLLTQHFVQ

SEQ ID NO: 127338 - protein, 9 aa, Homo sapiens
LLTQHFVQE

SEQ ID NO: 127339 - protein, 9 aa, Homo sapiens
LTQHFVQEN

SEQ ID NO: 127340 - protein, 9 aa, Homo sapiens
TQHFVQENY

SEQ ID NO: 127341 - protein, 9 aa, Homo sapiens
QHFVQENYL

SEQ ID NO: 127342 - protein, 9 aa, Homo sapiens
HFVQENYLE

SEQ ID NO: 127343 - protein, 9 aa, Homo sapiens
FVQENYLEY

SEQ ID NO: 127344 - protein, 9 aa, Homo sapiens
VQENYLEYR

SEQ ID NO: 127345 - protein, 9 aa, Homo sapiens
QENYLEYRQ

SEQ ID NO: 127346 - protein, 9 aa, Homo sapiens
ENYLEYRQV

SEQ ID NO: 127347 - protein, 9 aa, Homo sapiens
NYLEYRQVP

SEQ ID NO: 127348 - protein, 9 aa, Homo sapiens
YLEYRQVPG

SEQ ID NO: 127349 - protein, 9 aa, Homo sapiens
LEYRQVPGS

SEQ ID NO: 127350 - protein, 9 aa, Homo sapiens
EYRQVPGSD

SEQ ID NO: 127351 - protein, 9 aa, Homo sapiens
YRQVPGSDP

SEQ ID NO: 127352 - protein, 9 aa, Homo sapiens
RQVPGSDPA

SEQ ID NO: 127353 - protein, 9 aa, Homo sapiens
QVPGSDPAC

SEQ ID NO: 127354 - protein, 9 aa, Homo sapiens
VPGSDPACY

SEQ ID NO: 127355 - protein, 9 aa, Homo sapiens
PGSDPACYE

SEQ ID NO: 127356 - protein, 9 aa, Homo sapiens
GSDPACYEF

SEQ ID NO: 127357 - protein, 9 aa, Homo sapiens
SDPACYEFL

SEQ ID NO: 127358 - protein, 9 aa, Homo sapiens
DPACYEFLW

SEQ ID NO: 127359 - protein, 9 aa, Homo sapiens
PACYEFLWG

SEQ ID NO: 127360 - protein, 9 aa, Homo sapiens
ACYEFLWGP

SEQ ID NO: 127361 - protein, 9 aa, Homo sapiens
CYEFLWGPR

SEQ ID NO: 127362 - protein, 9 aa, Homo sapiens
YEFLWGPRA

SEQ ID NO: 127363 - protein, 9 aa, Homo sapiens
EFLWGPRAL

SEQ ID NO: 127364 - protein, 9 aa, Homo sapiens
FLWGPRALV

SEQ ID NO: 127365 - protein, 9 aa, Homo sapiens
LWGPRALVE

SEQ ID NO: 127366 - protein, 9 aa, Homo sapiens
WGPRALVET

SEQ ID NO: 127367 - protein, 9 aa, Homo sapiens
GPRALVETS

SEQ ID NO: 127368 - protein, 9 aa, Homo sapiens
PRALVETSY

SEQ ID NO: 127369 - protein, 9 aa, Homo sapiens
RALVETSYV

SEQ ID NO: 127370 - protein, 9 aa, Homo sapiens
ALVETSYVK

SEQ ID NO: 127371 - protein, 9 aa, Homo sapiens
LVETSYVKV

SEQ ID NO: 127372 - protein, 9 aa, Homo sapiens
VETSYVKVL

SEQ ID NO: 127373 - protein, 9 aa, Homo sapiens
ETSYVKVLH

SEQ ID NO: 127374 - protein, 9 aa, Homo sapiens
TSYVKVLHH

SEQ ID NO: 127375 - protein, 9 aa, Homo sapiens
SYVKVLHHM

SEQ ID NO: 127376 - protein, 9 aa, Homo sapiens
YVKVLHHMV

SEQ ID NO: 127377 - protein, 9 aa, Homo sapiens
VKVLHHMVK

SEQ ID NO: 127378 - protein, 9 aa, Homo sapiens
KVLHHMVKI

SEQ ID NO: 127379 - protein, 9 aa, Homo sapiens
VLHHMVKIS

SEQ ID NO: 127380 - protein, 9 aa, Homo sapiens
LHHMVKISG

SEQ ID NO: 127381 - protein, 9 aa, Homo sapiens
HHMVKISGG

SEQ ID NO: 127382 - protein, 9 aa, Homo sapiens
HMVKISGGP

SEQ ID NO: 127383 - protein, 9 aa, Homo sapiens
MVKISGGPH

SEQ ID NO: 127384 - protein, 9 aa, Homo sapiens
VKISGGPHI

SEQ ID NO: 127385 - protein, 9 aa, Homo sapiens
KISGGPHIS

SEQ ID NO: 127386 - protein, 9 aa, Homo sapiens
ISGGPHISY

SEQ ID NO: 127387 - protein, 9 aa, Homo sapiens
SGGPHISYP

SEQ ID NO: 127388 - protein, 9 aa, Homo sapiens
GGPHISYPP

SEQ ID NO: 127389 - protein, 9 aa, Homo sapiens
GPHISYPPL

SEQ ID NO: 127390 - protein, 9 aa, Homo sapiens
PHISYPPLH

SEQ ID NO: 127391 - protein, 9 aa, Homo sapiens
HISYPPLHE

SEQ ID NO: 127392 - protein, 9 aa, Homo sapiens
ISYPPLHEW

SEQ ID NO: 127393 - protein, 9 aa, Homo sapiens
SYPPLHEWV

SEQ ID NO: 127394 - protein, 9 aa, Homo sapiens
YPPLHEWVL

SEQ ID NO: 127395 - protein, 9 aa, Homo sapiens
PPLHEWVLR

SEQ ID NO: 127396 - protein, 9 aa, Homo sapiens
PLHEWVLRE

SEQ ID NO: 127397 - protein, 9 aa, Homo sapiens
LHEWVLREG

SEQ ID NO: 127398 - protein, 9 aa, Homo sapiens
HEWVLREGE

SEQ ID NO: 127399 - protein, 9 aa, Homo sapiens
EWVLREGEE

SEQ ID NO: 127400 - protein, 9 aa, Homo sapiens
MSSEQKSQH

SEQ ID NO: 127401 - protein, 9 aa, Homo sapiens
SSEQKSQHC

SEQ ID NO: 127402 - protein, 9 aa, Homo sapiens
SEQKSQHCK

SEQ ID NO: 127403 - protein, 9 aa, Homo sapiens
EQKSQHCKP

SEQ ID NO: 127404 - protein, 9 aa, Homo sapiens
QKSQHCKPE

SEQ ID NO: 127405 - protein, 9 aa, Homo sapiens
KSQHCKPEE

SEQ ID NO: 127406 - protein, 9 aa, Homo sapiens
SQHCKPEEG

SEQ ID NO: 127407 - protein, 9 aa, Homo sapiens
QHCKPEEGV

SEQ ID NO: 127408 - protein, 9 aa, Homo sapiens
HCKPEEGVE

SEQ ID NO: 127409 - protein, 9 aa, Homo sapiens
CKPEEGVEA

SEQ ID NO: 127410 - protein, 9 aa, Homo sapiens
KPEEGVEAQ

SEQ ID NO: 127411 - protein, 9 aa, Homo sapiens
PEEGVEAQE

SEQ ID NO: 127412 - protein, 9 aa, Homo sapiens
EEGVEAQEE

SEQ ID NO: 127413 - protein, 9 aa, Homo sapiens
EGVEAQEEA

SEQ ID NO: 127414 - protein, 9 aa, Homo sapiens
GVEAQEEAL

SEQ ID NO: 127415 - protein, 9 aa, Homo sapiens
VEAQEEALG

SEQ ID NO: 127416 - protein, 9 aa, Homo sapiens
EAQEEALGL

SEQ ID NO: 127417 - protein, 9 aa, Homo sapiens
AQEEALGLV

SEQ ID NO: 127418 - protein, 9 aa, Homo sapiens
QEEALGLVG

SEQ ID NO: 127419 - protein, 9 aa, Homo sapiens
EEALGLVGA

SEQ ID NO: 127420 - protein, 9 aa, Homo sapiens
EALGLVGAQ

SEQ ID NO: 127421 - protein, 9 aa, Homo sapiens
ALGLVGAQA

SEQ ID NO: 127422 - protein, 9 aa, Homo sapiens
LGLVGAQAP

SEQ ID NO: 127423 - protein, 9 aa, Homo sapiens
GLVGAQAPT

SEQ ID NO: 127424 - protein, 9 aa, Homo sapiens
LVGAQAPTT

SEQ ID NO: 127425 - protein, 9 aa, Homo sapiens
VGAQAPTTE

SEQ ID NO: 127426 - protein, 9 aa, Homo sapiens
GAQAPTTEE

SEQ ID NO: 127427 - protein, 9 aa, Homo sapiens
AQAPTTEEQ

SEQ ID NO: 127428 - protein, 9 aa, Homo sapiens
QAPTTEEQE

SEQ ID NO: 127429 - protein, 9 aa, Homo sapiens
APTTEEQEA

SEQ ID NO: 127430 - protein, 9 aa, Homo sapiens
PTTEEQEAA

SEQ ID NO: 127431 - protein, 9 aa, Homo sapiens
TTEEQEAAV

SEQ ID NO: 127432 - protein, 9 aa, Homo sapiens
TEEQEAAVS

SEQ ID NO: 127433 - protein, 9 aa, Homo sapiens
EEQEAAVSS

SEQ ID NO: 127434 - protein, 9 aa, Homo sapiens
EQEAAVSSS

SEQ ID NO: 127435 - protein, 9 aa, Homo sapiens
QEAAVSSSS

SEQ ID NO: 127436 - protein, 9 aa, Homo sapiens
EAAVSSSSP

SEQ ID NO: 127437 - protein, 9 aa, Homo sapiens
AAVSSSSPL

SEQ ID NO: 127438 - protein, 9 aa, Homo sapiens
AVSSSSPLV

SEQ ID NO: 127439 - protein, 9 aa, Homo sapiens
VSSSSPLVP

SEQ ID NO: 127440 - protein, 9 aa, Homo sapiens
SSSSPLVPG

SEQ ID NO: 127441 - protein, 9 aa, Homo sapiens
SSSPLVPGT

SEQ ID NO: 127442 - protein, 9 aa, Homo sapiens
SSPLVPGTL

SEQ ID NO: 127443 - protein, 9 aa, Homo sapiens
SPLVPGTLE

SEQ ID NO: 127444 - protein, 9 aa, Homo sapiens
PLVPGTLEE

SEQ ID NO: 127445 - protein, 9 aa, Homo sapiens
LVPGTLEEV

SEQ ID NO: 127446 - protein, 9 aa, Homo sapiens
VPGTLEEVP

SEQ ID NO: 127447 - protein, 9 aa, Homo sapiens
PGTLEEVPA

SEQ ID NO: 127448 - protein, 9 aa, Homo sapiens
GTLEEVPAA

SEQ ID NO: 127449 - protein, 9 aa, Homo sapiens
TLEEVPAAE

SEQ ID NO: 127450 - protein, 9 aa, Homo sapiens
LEEVPAAES

SEQ ID NO: 127451 - protein, 9 aa, Homo sapiens
EEVPAAESA

SEQ ID NO: 127452 - protein, 9 aa, Homo sapiens
EVPAAESAG

SEQ ID NO: 127453 - protein, 9 aa, Homo sapiens
VPAAESAGP

SEQ ID NO: 127454 - protein, 9 aa, Homo sapiens
PAAESAGPP

SEQ ID NO: 127455 - protein, 9 aa, Homo sapiens
AAESAGPPQ

SEQ ID NO: 127456 - protein, 9 aa, Homo sapiens
AESAGPPQS

SEQ ID NO: 127457 - protein, 9 aa, Homo sapiens
ESAGPPQSP

SEQ ID NO: 127458 - protein, 9 aa, Homo sapiens
SAGPPQSPQ

SEQ ID NO: 127459 - protein, 9 aa, Homo sapiens
AGPPQSPQG

SEQ ID NO: 127460 - protein, 9 aa, Homo sapiens
GPPQSPQGA

SEQ ID NO: 127461 - protein, 9 aa, Homo sapiens
PPQSPQGAS

SEQ ID NO: 127462 - protein, 9 aa, Homo sapiens
PQSPQGASA

SEQ ID NO: 127463 - protein, 9 aa, Homo sapiens
QSPQGASAL

SEQ ID NO: 127464 - protein, 9 aa, Homo sapiens
SPQGASALP

SEQ ID NO: 127465 - protein, 9 aa, Homo sapiens
PQGASALPT

SEQ ID NO: 127466 - protein, 9 aa, Homo sapiens
QGASALPTT

SEQ ID NO: 127467 - protein, 9 aa, Homo sapiens
GASALPTTI

SEQ ID NO: 127468 - protein, 9 aa, Homo sapiens
ASALPTTIS

SEQ ID NO: 127469 - protein, 9 aa, Homo sapiens
SALPTTISF

SEQ ID NO: 127470 - protein, 9 aa, Homo sapiens
ALPTTISFT

SEQ ID NO: 127471 - protein, 9 aa, Homo sapiens
LPTTISFTC

SEQ ID NO: 127472 - protein, 9 aa, Homo sapiens
PTTISFTCW

SEQ ID NO: 127473 - protein, 9 aa, Homo sapiens
TTISFTCWR

SEQ ID NO: 127474 - protein, 9 aa, Homo sapiens
TISFTCWRQ

SEQ ID NO: 127475 - protein, 9 aa, Homo sapiens
ISFTCWRQP

SEQ ID NO: 127476 - protein, 9 aa, Homo sapiens
SFTCWRQPN

SEQ ID NO: 127477 - protein, 9 aa, Homo sapiens
FTCWRQPNE

SEQ ID NO: 127478 - protein, 9 aa, Homo sapiens
TCWRQPNEG

SEQ ID NO: 127479 - protein, 9 aa, Homo sapiens
CWRQPNEGS

SEQ ID NO: 127480 - protein, 9 aa, Homo sapiens
WRQPNEGSS

SEQ ID NO: 127481 - protein, 9 aa, Homo sapiens
RQPNEGSSS

SEQ ID NO: 127482 - protein, 9 aa, Homo sapiens
QPNEGSSSQ

SEQ ID NO: 127483 - protein, 9 aa, Homo sapiens
PNEGSSSQE

SEQ ID NO: 127484 - protein, 9 aa, Homo sapiens
NEGSSSQEE

SEQ ID NO: 127485 - protein, 9 aa, Homo sapiens
EGSSSQEEE

SEQ ID NO: 127486 - protein, 9 aa, Homo sapiens
GSSSQEEEG

SEQ ID NO: 127487 - protein, 9 aa, Homo sapiens
SSSQEEEGP

SEQ ID NO: 127488 - protein, 9 aa, Homo sapiens
SSQEEEGPS

SEQ ID NO: 127489 - protein, 9 aa, Homo sapiens
SQEEEGPST

SEQ ID NO: 127490 - protein, 9 aa, Homo sapiens
QEEEGPSTS

SEQ ID NO: 127491 - protein, 9 aa, Homo sapiens
EEEGPSTSP

SEQ ID NO: 127492 - protein, 9 aa, Homo sapiens
EEGPSTSPD

SEQ ID NO: 127493 - protein, 9 aa, Homo sapiens
EGPSTSPDA

SEQ ID NO: 127494 - protein, 9 aa, Homo sapiens
GPSTSPDAE

SEQ ID NO: 127495 - protein, 9 aa, Homo sapiens
PSTSPDAES

SEQ ID NO: 127496 - protein, 9 aa, Homo sapiens
STSPDAESL

SEQ ID NO: 127497 - protein, 9 aa, Homo sapiens
TSPDAESLF

SEQ ID NO: 127498 - protein, 9 aa, Homo sapiens
SPDAESLFR

SEQ ID NO: 127499 - protein, 9 aa, Homo sapiens
PDAESLFRE

SEQ ID NO: 127500 - protein, 9 aa, Homo sapiens
DAESLFREA

SEQ ID NO: 127501 - protein, 9 aa, Homo sapiens
AESLFREAL

SEQ ID NO: 127502 - protein, 9 aa, Homo sapiens
ESLFREALS

SEQ ID NO: 127503 - protein, 9 aa, Homo sapiens
SLFREALSN

SEQ ID NO: 127504 - protein, 9 aa, Homo sapiens
LFREALSNK

SEQ ID NO: 127505 - protein, 9 aa, Homo sapiens
FREALSNKV

SEQ ID NO: 127506 - protein, 9 aa, Homo sapiens
REALSNKVD

SEQ ID NO: 127507 - protein, 9 aa, Homo sapiens
EALSNKVDE

SEQ ID NO: 127508 - protein, 9 aa, Homo sapiens
ALSNKVDEL

SEQ ID NO: 127509 - protein, 9 aa, Homo sapiens
LSNKVDELA

SEQ ID NO: 127510 - protein, 9 aa, Homo sapiens
SNKVDELAH

SEQ ID NO: 127511 - protein, 9 aa, Homo sapiens
NKVDELAHF

SEQ ID NO: 127512 - protein, 9 aa, Homo sapiens
KVDELAHFL

SEQ ID NO: 127513 - protein, 9 aa, Homo sapiens
VDELAHFLL

SEQ ID NO: 127514 - protein, 9 aa, Homo sapiens
DELAHFLLR

SEQ ID NO: 127515 - protein, 9 aa, Homo sapiens
ELAHFLLRK

SEQ ID NO: 127516 - protein, 9 aa, Homo sapiens
LAHFLLRKY

SEQ ID NO: 127517 - protein, 9 aa, Homo sapiens
AHFLLRKYR

SEQ ID NO: 127518 - protein, 9 aa, Homo sapiens
HFLLRKYRA

SEQ ID NO: 127519 - protein, 9 aa, Homo sapiens
FLLRKYRAK

SEQ ID NO: 127520 - protein, 9 aa, Homo sapiens
LLRKYRAKE

SEQ ID NO: 127521 - protein, 9 aa, Homo sapiens
LRKYRAKEL

SEQ ID NO: 127522 - protein, 9 aa, Homo sapiens
RKYRAKELV

SEQ ID NO: 127523 - protein, 9 aa, Homo sapiens
KYRAKELVT

SEQ ID NO: 127524 - protein, 9 aa, Homo sapiens
YRAKELVTK

SEQ ID NO: 127525 - protein, 9 aa, Homo sapiens
RAKELVTKA

SEQ ID NO: 127526 - protein, 9 aa, Homo sapiens
AKELVTKAE

SEQ ID NO: 127527 - protein, 9 aa, Homo sapiens
KELVTKAEM

SEQ ID NO: 127528 - protein, 9 aa, Homo sapiens
ELVTKAEML

SEQ ID NO: 127529 - protein, 9 aa, Homo sapiens
LVTKAEMLE

SEQ ID NO: 127530 - protein, 9 aa, Homo sapiens
VTKAEMLER

SEQ ID NO: 127531 - protein, 9 aa, Homo sapiens
TKAEMLERV

SEQ ID NO: 127532 - protein, 9 aa, Homo sapiens
KAEMLERVI

SEQ ID NO: 127533 - protein, 9 aa, Homo sapiens
AEMLERVIK

SEQ ID NO: 127534 - protein, 9 aa, Homo sapiens
EMLERVIKN

SEQ ID NO: 127535 - protein, 9 aa, Homo sapiens
MLERVIKNY

SEQ ID NO: 127536 - protein, 9 aa, Homo sapiens
LERVIKNYK

SEQ ID NO: 127537 - protein, 9 aa, Homo sapiens
ERVIKNYKR

SEQ ID NO: 127538 - protein, 9 aa, Homo sapiens
RVIKNYKRC

SEQ ID NO: 127539 - protein, 9 aa, Homo sapiens
VIKNYKRCF

SEQ ID NO: 127540 - protein, 9 aa, Homo sapiens
IKNYKRCFP

SEQ ID NO: 127541 - protein, 9 aa, Homo sapiens
KNYKRCFPV

SEQ ID NO: 127542 - protein, 9 aa, Homo sapiens
NYKRCFPVI

SEQ ID NO: 127543 - protein, 9 aa, Homo sapiens
YKRCFPVIF

SEQ ID NO: 127544 - protein, 9 aa, Homo sapiens
KRCFPVIFG

SEQ ID NO: 127545 - protein, 9 aa, Homo sapiens
RCFPVIFGK

SEQ ID NO: 127546 - protein, 9 aa, Homo sapiens
CFPVIFGKA

SEQ ID NO: 127547 - protein, 9 aa, Homo sapiens
FPVIFGKAS

SEQ ID NO: 127548 - protein, 9 aa, Homo sapiens
PVIFGKASE

SEQ ID NO: 127549 - protein, 9 aa, Homo sapiens
VIFGKASES

SEQ ID NO: 127550 - protein, 9 aa, Homo sapiens
IFGKASESL

SEQ ID NO: 127551 - protein, 9 aa, Homo sapiens
FGKASESLK

SEQ ID NO: 127552 - protein, 9 aa, Homo sapiens
GKASESLKM

SEQ ID NO: 127553 - protein, 9 aa, Homo sapiens
KASESLKMI

SEQ ID NO: 127554 - protein, 9 aa, Homo sapiens
ASESLKMIF

SEQ ID NO: 127555 - protein, 9 aa, Homo sapiens
SESLKMIFG

SEQ ID NO: 127556 - protein, 9 aa, Homo sapiens
ESLKMIFGI

SEQ ID NO: 127557 - protein, 9 aa, Homo sapiens
SLKMIFGID

SEQ ID NO: 127558 - protein, 9 aa, Homo sapiens
LKMIFGIDV

SEQ ID NO: 127559 - protein, 9 aa, Homo sapiens
KMIFGIDVK

SEQ ID NO: 127560 - protein, 9 aa, Homo sapiens
MIFGIDVKE

SEQ ID NO: 127561 - protein, 9 aa, Homo sapiens
IFGIDVKEV

SEQ ID NO: 127562 - protein, 9 aa, Homo sapiens
FGIDVKEVD

SEQ ID NO: 127563 - protein, 9 aa, Homo sapiens
GIDVKEVDP

SEQ ID NO: 127564 - protein, 9 aa, Homo sapiens
IDVKEVDPA

SEQ ID NO: 127565 - protein, 9 aa, Homo sapiens
DVKEVDPAS

SEQ ID NO: 127566 - protein, 9 aa, Homo sapiens
VKEVDPASN

SEQ ID NO: 127567 - protein, 9 aa, Homo sapiens
KEVDPASNT

SEQ ID NO: 127568 - protein, 9 aa, Homo sapiens
EVDPASNTY

SEQ ID NO: 127569 - protein, 9 aa, Homo sapiens
VDPASNTYT

SEQ ID NO: 127570 - protein, 9 aa, Homo sapiens
DPASNTYTL

SEQ ID NO: 127571 - protein, 9 aa, Homo sapiens
PASNTYTLV

SEQ ID NO: 127572 - protein, 9 aa, Homo sapiens
ASNTYTLVT

SEQ ID NO: 127573 - protein, 9 aa, Homo sapiens
SNTYTLVTC

SEQ ID NO: 127574 - protein, 9 aa, Homo sapiens
NTYTLVTCL

SEQ ID NO: 127575 - protein, 9 aa, Homo sapiens
TYTLVTCLG

SEQ ID NO: 127576 - protein, 9 aa, Homo sapiens
YTLVTCLGL

SEQ ID NO: 127577 - protein, 9 aa, Homo sapiens
TLVTCLGLS

SEQ ID NO: 127578 - protein, 9 aa, Homo sapiens
LVTCLGLSY

SEQ ID NO: 127579 - protein, 9 aa, Homo sapiens
VTCLGLSYD

SEQ ID NO: 127580 - protein, 9 aa, Homo sapiens
TCLGLSYDG

SEQ ID NO: 127581 - protein, 9 aa, Homo sapiens
CLGLSYDGL

SEQ ID NO: 127582 - protein, 9 aa, Homo sapiens
LGLSYDGLL

SEQ ID NO: 127583 - protein, 9 aa, Homo sapiens
GLSYDGLLG

SEQ ID NO: 127584 - protein, 9 aa, Homo sapiens
LSYDGLLGN

SEQ ID NO: 127585 - protein, 9 aa, Homo sapiens
SYDGLLGNN

SEQ ID NO: 127586 - protein, 9 aa, Homo sapiens
YDGLLGNNQ

SEQ ID NO: 127587 - protein, 9 aa, Homo sapiens
DGLLGNNQI

SEQ ID NO: 127588 - protein, 9 aa, Homo sapiens
GLLGNNQIF

SEQ ID NO: 127589 - protein, 9 aa, Homo sapiens
LLGNNQIFP

SEQ ID NO: 127590 - protein, 9 aa, Homo sapiens
LGNNQIFPK

SEQ ID NO: 127591 - protein, 9 aa, Homo sapiens
GNNQIFPKT

SEQ ID NO: 127592 - protein, 9 aa, Homo sapiens
NNQIFPKTG

SEQ ID NO: 127593 - protein, 9 aa, Homo sapiens
NQIFPKTGL

SEQ ID NO: 127594 - protein, 9 aa, Homo sapiens
QIFPKTGLL

SEQ ID NO: 127595 - protein, 9 aa, Homo sapiens
IFPKTGLLI

SEQ ID NO: 127596 - protein, 9 aa, Homo sapiens
FPKTGLLII

SEQ ID NO: 127597 - protein, 9 aa, Homo sapiens
PKTGLLIIV

SEQ ID NO: 127598 - protein, 9 aa, Homo sapiens
KTGLLIIVL

SEQ ID NO: 127599 - protein, 9 aa, Homo sapiens
TGLLIIVLG

SEQ ID NO: 127600 - protein, 9 aa, Homo sapiens
GLLIIVLGT

SEQ ID NO: 127601 - protein, 9 aa, Homo sapiens
LLIIVLGTI

SEQ ID NO: 127602 - protein, 9 aa, Homo sapiens
LIIVLGTIA

SEQ ID NO: 127603 - protein, 9 aa, Homo sapiens
IIVLGTIAM

SEQ ID NO: 127604 - protein, 9 aa, Homo sapiens
IVLGTIAME

SEQ ID NO: 127605 - protein, 9 aa, Homo sapiens
VLGTIAMEG

SEQ ID NO: 127606 - protein, 9 aa, Homo sapiens
LGTIAMEGD

SEQ ID NO: 127607 - protein, 9 aa, Homo sapiens
GTIAMEGDS

SEQ ID NO: 127608 - protein, 9 aa, Homo sapiens
TIAMEGDSA

SEQ ID NO: 127609 - protein, 9 aa, Homo sapiens
IAMEGDSAS

SEQ ID NO: 127610 - protein, 9 aa, Homo sapiens
AMEGDSASE

SEQ ID NO: 127611 - protein, 9 aa, Homo sapiens
MEGDSASEE

SEQ ID NO: 127612 - protein, 9 aa, Homo sapiens
EGDSASEEE

SEQ ID NO: 127613 - protein, 9 aa, Homo sapiens
GDSASEEEI

SEQ ID NO: 127614 - protein, 9 aa, Homo sapiens
DSASEEEIW

SEQ ID NO: 127615 - protein, 9 aa, Homo sapiens
SASEEEIWE

SEQ ID NO: 127616 - protein, 9 aa, Homo sapiens
ASEEEIWEE

SEQ ID NO: 127617 - protein, 9 aa, Homo sapiens
SEEEIWEEL

SEQ ID NO: 127618 - protein, 9 aa, Homo sapiens
EEEIWEELG

SEQ ID NO: 127619 - protein, 9 aa, Homo sapiens
EEIWEELGV

SEQ ID NO: 127620 - protein, 9 aa, Homo sapiens
EIWEELGVM

SEQ ID NO: 127621 - protein, 9 aa, Homo sapiens
IWEELGVMG

SEQ ID NO: 127622 - protein, 9 aa, Homo sapiens
WEELGVMGV

SEQ ID NO: 127623 - protein, 9 aa, Homo sapiens
EELGVMGVY

SEQ ID NO: 127624 - protein, 9 aa, Homo sapiens
ELGVMGVYD

SEQ ID NO: 127625 - protein, 9 aa, Homo sapiens
LGVMGVYDG

SEQ ID NO: 127626 - protein, 9 aa, Homo sapiens
GVMGVYDGR

SEQ ID NO: 127627 - protein, 9 aa, Homo sapiens
VMGVYDGRE

SEQ ID NO: 127628 - protein, 9 aa, Homo sapiens
MGVYDGREH

SEQ ID NO: 127629 - protein, 9 aa, Homo sapiens
GVYDGREHT

SEQ ID NO: 127630 - protein, 9 aa, Homo sapiens
VYDGREHTV

SEQ ID NO: 127631 - protein, 9 aa, Homo sapiens
YDGREHTVY

SEQ ID NO: 127632 - protein, 9 aa, Homo sapiens
DGREHTVYG

SEQ ID NO: 127633 - protein, 9 aa, Homo sapiens
GREHTVYGE

SEQ ID NO: 127634 - protein, 9 aa, Homo sapiens
REHTVYGEP

SEQ ID NO: 127635 - protein, 9 aa, Homo sapiens
EHTVYGEPR

SEQ ID NO: 127636 - protein, 9 aa, Homo sapiens
HTVYGEPRK

SEQ ID NO: 127637 - protein, 9 aa, Homo sapiens
TVYGEPRKL

SEQ ID NO: 127638 - protein, 9 aa, Homo sapiens
VYGEPRKLL

SEQ ID NO: 127639 - protein, 9 aa, Homo sapiens
YGEPRKLLT

SEQ ID NO: 127640 - protein, 9 aa, Homo sapiens
GEPRKLLTQ

SEQ ID NO: 127641 - protein, 9 aa, Homo sapiens
EPRKLLTQD

SEQ ID NO: 127642 - protein, 9 aa, Homo sapiens
PRKLLTQDW

SEQ ID NO: 127643 - protein, 9 aa, Homo sapiens
RKLLTQDWV

SEQ ID NO: 127644 - protein, 9 aa, Homo sapiens
KLLTQDWVQ

SEQ ID NO: 127645 - protein, 9 aa, Homo sapiens
LLTQDWVQE

SEQ ID NO: 127646 - protein, 9 aa, Homo sapiens
LTQDWVQEN

SEQ ID NO: 127647 - protein, 9 aa, Homo sapiens
TQDWVQENY

SEQ ID NO: 127648 - protein, 9 aa, Homo sapiens
QDWVQENYL

SEQ ID NO: 127649 - protein, 9 aa, Homo sapiens
DWVQENYLE

SEQ ID NO: 127650 - protein, 9 aa, Homo sapiens
WVQENYLEY

SEQ ID NO: 127651 - protein, 9 aa, Homo sapiens
VQENYLEYR

SEQ ID NO: 127652 - protein, 9 aa, Homo sapiens
QENYLEYRQ

SEQ ID NO: 127653 - protein, 9 aa, Homo sapiens
ENYLEYRQV

SEQ ID NO: 127654 - protein, 9 aa, Homo sapiens
NYLEYRQVP

SEQ ID NO: 127655 - protein, 9 aa, Homo sapiens
YLEYRQVPG

SEQ ID NO: 127656 - protein, 9 aa, Homo sapiens
LEYRQVPGS

SEQ ID NO: 127657 - protein, 9 aa, Homo sapiens
EYRQVPGSN

SEQ ID NO: 127658 - protein, 9 aa, Homo sapiens
YRQVPGSNP

SEQ ID NO: 127659 - protein, 9 aa, Homo sapiens
RQVPGSNPA

SEQ ID NO: 127660 - protein, 9 aa, Homo sapiens
QVPGSNPAR

SEQ ID NO: 127661 - protein, 9 aa, Homo sapiens
VPGSNPARY

SEQ ID NO: 127662 - protein, 9 aa, Homo sapiens
PGSNPARYE

SEQ ID NO: 127663 - protein, 9 aa, Homo sapiens
GSNPARYEF

SEQ ID NO: 127664 - protein, 9 aa, Homo sapiens
SNPARYEFL

SEQ ID NO: 127665 - protein, 9 aa, Homo sapiens
NPARYEFLW

SEQ ID NO: 127666 - protein, 9 aa, Homo sapiens
PARYEFLWG

SEQ ID NO: 127667 - protein, 9 aa, Homo sapiens
ARYEFLWGP

SEQ ID NO: 127668 - protein, 9 aa, Homo sapiens
RYEFLWGPR

SEQ ID NO: 127669 - protein, 9 aa, Homo sapiens
YEFLWGPRA

SEQ ID NO: 127670 - protein, 9 aa, Homo sapiens
EFLWGPRAL

SEQ ID NO: 127671 - protein, 9 aa, Homo sapiens
FLWGPRALA

SEQ ID NO: 127672 - protein, 9 aa, Homo sapiens
LWGPRALAE

SEQ ID NO: 127673 - protein, 9 aa, Homo sapiens
WGPRALAET

SEQ ID NO: 127674 - protein, 9 aa, Homo sapiens
GPRALAETS

SEQ ID NO: 127675 - protein, 9 aa, Homo sapiens
PRALAETSY

SEQ ID NO: 127676 - protein, 9 aa, Homo sapiens
RALAETSYV

SEQ ID NO: 127677 - protein, 9 aa, Homo sapiens
ALAETSYVK

SEQ ID NO: 127678 - protein, 9 aa, Homo sapiens
LAETSYVKV

SEQ ID NO: 127679 - protein, 9 aa, Homo sapiens
AETSYVKVL

SEQ ID NO: 127680 - protein, 9 aa, Homo sapiens
ETSYVKVLE

SEQ ID NO: 127681 - protein, 9 aa, Homo sapiens
TSYVKVLEH

SEQ ID NO: 127682 - protein, 9 aa, Homo sapiens
SYVKVLEHV

SEQ ID NO: 127683 - protein, 9 aa, Homo sapiens
YVKVLEHVV

SEQ ID NO: 127684 - protein, 9 aa, Homo sapiens
VKVLEHVVR

SEQ ID NO: 127685 - protein, 9 aa, Homo sapiens
KVLEHVVRV

SEQ ID NO: 127686 - protein, 9 aa, Homo sapiens
VLEHVVRVN

SEQ ID NO: 127687 - protein, 9 aa, Homo sapiens
LEHVVRVNA

SEQ ID NO: 127688 - protein, 9 aa, Homo sapiens
EHVVRVNAR

SEQ ID NO: 127689 - protein, 9 aa, Homo sapiens
HVVRVNARV

SEQ ID NO: 127690 - protein, 9 aa, Homo sapiens
VVRVNARVR

SEQ ID NO: 127691 - protein, 9 aa, Homo sapiens
VRVNARVRI

SEQ ID NO: 127692 - protein, 9 aa, Homo sapiens
RVNARVRIA

SEQ ID NO: 127693 - protein, 9 aa, Homo sapiens
VNARVRIAY

SEQ ID NO: 127694 - protein, 9 aa, Homo sapiens
NARVRIAYP

SEQ ID NO: 127695 - protein, 9 aa, Homo sapiens
ARVRIAYPS

SEQ ID NO: 127696 - protein, 9 aa, Homo sapiens
RVRIAYPSL

SEQ ID NO: 127697 - protein, 9 aa, Homo sapiens
VRIAYPSLR

SEQ ID NO: 127698 - protein, 9 aa, Homo sapiens
RIAYPSLRE

SEQ ID NO: 127699 - protein, 9 aa, Homo sapiens
IAYPSLREA

SEQ ID NO: 127700 - protein, 9 aa, Homo sapiens
AYPSLREAA

SEQ ID NO: 127701 - protein, 9 aa, Homo sapiens
YPSLREAAL

SEQ ID NO: 127702 - protein, 9 aa, Homo sapiens
PSLREAALL

SEQ ID NO: 127703 - protein, 9 aa, Homo sapiens
SLREAALLE

SEQ ID NO: 127704 - protein, 9 aa, Homo sapiens
LREAALLEE

SEQ ID NO: 127705 - protein, 9 aa, Homo sapiens
REAALLEEE

SEQ ID NO: 127706 - protein, 9 aa, Homo sapiens
EAALLEEEE

SEQ ID NO: 127707 - protein, 9 aa, Homo sapiens
AALLEEEEG

SEQ ID NO: 127708 - protein, 9 aa, Homo sapiens
ALLEEEEGV

SEQ ID NO: 127709 - protein, 9 aa, Homo sapiens
MSLEQKSQH

SEQ ID NO: 127710 - protein, 9 aa, Homo sapiens
SLEQKSQHC

SEQ ID NO: 127711 - protein, 9 aa, Homo sapiens
LEQKSQHCK

SEQ ID NO: 127712 - protein, 9 aa, Homo sapiens
EQKSQHCKP

SEQ ID NO: 127713 - protein, 9 aa, Homo sapiens
QKSQHCKPE

SEQ ID NO: 127714 - protein, 9 aa, Homo sapiens
KSQHCKPEE

SEQ ID NO: 127715 - protein, 9 aa, Homo sapiens
SQHCKPEEG

SEQ ID NO: 127716 - protein, 9 aa, Homo sapiens
QHCKPEEGL

SEQ ID NO: 127717 - protein, 9 aa, Homo sapiens
HCKPEEGLD

SEQ ID NO: 127718 - protein, 9 aa, Homo sapiens
CKPEEGLDT

SEQ ID NO: 127719 - protein, 9 aa, Homo sapiens
KPEEGLDTQ

SEQ ID NO: 127720 - protein, 9 aa, Homo sapiens
PEEGLDTQE

SEQ ID NO: 127721 - protein, 9 aa, Homo sapiens
EEGLDTQEE

SEQ ID NO: 127722 - protein, 9 aa, Homo sapiens
EGLDTQEEA

SEQ ID NO: 127723 - protein, 9 aa, Homo sapiens
GLDTQEEAL

SEQ ID NO: 127724 - protein, 9 aa, Homo sapiens
LDTQEEALG

SEQ ID NO: 127725 - protein, 9 aa, Homo sapiens
DTQEEALGL

SEQ ID NO: 127726 - protein, 9 aa, Homo sapiens
TQEEALGLV

SEQ ID NO: 127727 - protein, 9 aa, Homo sapiens
QEEALGLVG

SEQ ID NO: 127728 - protein, 9 aa, Homo sapiens
EEALGLVGV

SEQ ID NO: 127729 - protein, 9 aa, Homo sapiens
EALGLVGVQ

SEQ ID NO: 127730 - protein, 9 aa, Homo sapiens
ALGLVGVQA

SEQ ID NO: 127731 - protein, 9 aa, Homo sapiens
LGLVGVQAA

SEQ ID NO: 127732 - protein, 9 aa, Homo sapiens
GLVGVQAAT

SEQ ID NO: 127733 - protein, 9 aa, Homo sapiens
LVGVQAATT

SEQ ID NO: 127734 - protein, 9 aa, Homo sapiens
VGVQAATTE

SEQ ID NO: 127735 - protein, 9 aa, Homo sapiens
GVQAATTEE

SEQ ID NO: 127736 - protein, 9 aa, Homo sapiens
VQAATTEEQ

SEQ ID NO: 127737 - protein, 9 aa, Homo sapiens
QAATTEEQE

SEQ ID NO: 127738 - protein, 9 aa, Homo sapiens
AATTEEQEA

SEQ ID NO: 127739 - protein, 9 aa, Homo sapiens
ATTEEQEAV

SEQ ID NO: 127740 - protein, 9 aa, Homo sapiens
TTEEQEAVS

SEQ ID NO: 127741 - protein, 9 aa, Homo sapiens
TEEQEAVSS

SEQ ID NO: 127742 - protein, 9 aa, Homo sapiens
EEQEAVSSS

SEQ ID NO: 127743 - protein, 9 aa, Homo sapiens
EQEAVSSSS

SEQ ID NO: 127744 - protein, 9 aa, Homo sapiens
QEAVSSSSP

SEQ ID NO: 127745 - protein, 9 aa, Homo sapiens
EAVSSSSPL

SEQ ID NO: 127746 - protein, 9 aa, Homo sapiens
AVSSSSPLV

SEQ ID NO: 127747 - protein, 9 aa, Homo sapiens
VSSSSPLVP

SEQ ID NO: 127748 - protein, 9 aa, Homo sapiens
SSSSPLVPG

SEQ ID NO: 127749 - protein, 9 aa, Homo sapiens
SSSPLVPGT

SEQ ID NO: 127750 - protein, 9 aa, Homo sapiens
SSPLVPGTL

SEQ ID NO: 127751 - protein, 9 aa, Homo sapiens
SPLVPGTLG

SEQ ID NO: 127752 - protein, 9 aa, Homo sapiens
PLVPGTLGE

SEQ ID NO: 127753 - protein, 9 aa, Homo sapiens
LVPGTLGEV

SEQ ID NO: 127754 - protein, 9 aa, Homo sapiens
VPGTLGEVP

SEQ ID NO: 127755 - protein, 9 aa, Homo sapiens
PGTLGEVPA

SEQ ID NO: 127756 - protein, 9 aa, Homo sapiens
GTLGEVPAA

SEQ ID NO: 127757 - protein, 9 aa, Homo sapiens
TLGEVPAAG

SEQ ID NO: 127758 - protein, 9 aa, Homo sapiens
LGEVPAAGS

SEQ ID NO: 127759 - protein, 9 aa, Homo sapiens
GEVPAAGSP

SEQ ID NO: 127760 - protein, 9 aa, Homo sapiens
EVPAAGSPG

SEQ ID NO: 127761 - protein, 9 aa, Homo sapiens
VPAAGSPGP

SEQ ID NO: 127762 - protein, 9 aa, Homo sapiens
PAAGSPGPL

SEQ ID NO: 127763 - protein, 9 aa, Homo sapiens
AAGSPGPLK

SEQ ID NO: 127764 - protein, 9 aa, Homo sapiens
AGSPGPLKS

SEQ ID NO: 127765 - protein, 9 aa, Homo sapiens
GSPGPLKSP

SEQ ID NO: 127766 - protein, 9 aa, Homo sapiens
SPGPLKSPQ

SEQ ID NO: 127767 - protein, 9 aa, Homo sapiens
PGPLKSPQG

SEQ ID NO: 127768 - protein, 9 aa, Homo sapiens
GPLKSPQGA

SEQ ID NO: 127769 - protein, 9 aa, Homo sapiens
PLKSPQGAS

SEQ ID NO: 127770 - protein, 9 aa, Homo sapiens
LKSPQGASA

SEQ ID NO: 127771 - protein, 9 aa, Homo sapiens
KSPQGASAI

SEQ ID NO: 127772 - protein, 9 aa, Homo sapiens
SPQGASAIP

SEQ ID NO: 127773 - protein, 9 aa, Homo sapiens
PQGASAIPT

SEQ ID NO: 127774 - protein, 9 aa, Homo sapiens
QGASAIPTA

SEQ ID NO: 127775 - protein, 9 aa, Homo sapiens
GASAIPTAI

SEQ ID NO: 127776 - protein, 9 aa, Homo sapiens
ASAIPTAID

SEQ ID NO: 127777 - protein, 9 aa, Homo sapiens
SAIPTAIDF

SEQ ID NO: 127778 - protein, 9 aa, Homo sapiens
AIPTAIDFT

SEQ ID NO: 127779 - protein, 9 aa, Homo sapiens
IPTAIDFTL

SEQ ID NO: 127780 - protein, 9 aa, Homo sapiens
PTAIDFTLW

SEQ ID NO: 127781 - protein, 9 aa, Homo sapiens
TAIDFTLWR

SEQ ID NO: 127782 - protein, 9 aa, Homo sapiens
AIDFTLWRQ

SEQ ID NO: 127783 - protein, 9 aa, Homo sapiens
IDFTLWRQS

SEQ ID NO: 127784 - protein, 9 aa, Homo sapiens
DFTLWRQSI

SEQ ID NO: 127785 - protein, 9 aa, Homo sapiens
FTLWRQSIK

SEQ ID NO: 127786 - protein, 9 aa, Homo sapiens
TLWRQSIKG

SEQ ID NO: 127787 - protein, 9 aa, Homo sapiens
LWRQSIKGS

SEQ ID NO: 127788 - protein, 9 aa, Homo sapiens
WRQSIKGSS

SEQ ID NO: 127789 - protein, 9 aa, Homo sapiens
RQSIKGSSN

SEQ ID NO: 127790 - protein, 9 aa, Homo sapiens
QSIKGSSNQ

SEQ ID NO: 127791 - protein, 9 aa, Homo sapiens
SIKGSSNQE

SEQ ID NO: 127792 - protein, 9 aa, Homo sapiens
IKGSSNQEE

SEQ ID NO: 127793 - protein, 9 aa, Homo sapiens
KGSSNQEEE

SEQ ID NO: 127794 - protein, 9 aa, Homo sapiens
GSSNQEEEG

SEQ ID NO: 127795 - protein, 9 aa, Homo sapiens
SSNQEEEGP

SEQ ID NO: 127796 - protein, 9 aa, Homo sapiens
SNQEEEGPS

SEQ ID NO: 127797 - protein, 9 aa, Homo sapiens
NQEEEGPST

SEQ ID NO: 127798 - protein, 9 aa, Homo sapiens
QEEEGPSTS

SEQ ID NO: 127799 - protein, 9 aa, Homo sapiens
EEEGPSTSP

SEQ ID NO: 127800 - protein, 9 aa, Homo sapiens
EEGPSTSPD

SEQ ID NO: 127801 - protein, 9 aa, Homo sapiens
EGPSTSPDP

SEQ ID NO: 127802 - protein, 9 aa, Homo sapiens
GPSTSPDPE

SEQ ID NO: 127803 - protein, 9 aa, Homo sapiens
PSTSPDPES

SEQ ID NO: 127804 - protein, 9 aa, Homo sapiens
STSPDPESV

SEQ ID NO: 127805 - protein, 9 aa, Homo sapiens
TSPDPESVF

SEQ ID NO: 127806 - protein, 9 aa, Homo sapiens
SPDPESVFR

SEQ ID NO: 127807 - protein, 9 aa, Homo sapiens
PDPESVFRA

SEQ ID NO: 127808 - protein, 9 aa, Homo sapiens
DPESVFRAA

SEQ ID NO: 127809 - protein, 9 aa, Homo sapiens
PESVFRAAL

SEQ ID NO: 127810 - protein, 9 aa, Homo sapiens
ESVFRAALS

SEQ ID NO: 127811 - protein, 9 aa, Homo sapiens
SVFRAALSK

SEQ ID NO: 127812 - protein, 9 aa, Homo sapiens
VFRAALSKK

SEQ ID NO: 127813 - protein, 9 aa, Homo sapiens
FRAALSKKV

SEQ ID NO: 127814 - protein, 9 aa, Homo sapiens
RAALSKKVA

SEQ ID NO: 127815 - protein, 9 aa, Homo sapiens
AALSKKVAD

SEQ ID NO: 127816 - protein, 9 aa, Homo sapiens
ALSKKVADL

SEQ ID NO: 127817 - protein, 9 aa, Homo sapiens
LSKKVADLI

SEQ ID NO: 127818 - protein, 9 aa, Homo sapiens
SKKVADLIH

SEQ ID NO: 127819 - protein, 9 aa, Homo sapiens
KKVADLIHF

SEQ ID NO: 127820 - protein, 9 aa, Homo sapiens
KVADLIHFL

SEQ ID NO: 127821 - protein, 9 aa, Homo sapiens
VADLIHFLL

SEQ ID NO: 127822 - protein, 9 aa, Homo sapiens
ADLIHFLLL

SEQ ID NO: 127823 - protein, 9 aa, Homo sapiens
DLIHFLLLK

SEQ ID NO: 127824 - protein, 9 aa, Homo sapiens
LIHFLLLKY

SEQ ID NO: 127825 - protein, 9 aa, Homo sapiens
MPLEQRSQH

SEQ ID NO: 127826 - protein, 9 aa, Homo sapiens
PLEQRSQHC

SEQ ID NO: 127827 - protein, 9 aa, Homo sapiens
LEQRSQHCK

SEQ ID NO: 127828 - protein, 9 aa, Homo sapiens
EQRSQHCKP

SEQ ID NO: 127829 - protein, 9 aa, Homo sapiens
QRSQHCKPE

SEQ ID NO: 127830 - protein, 9 aa, Homo sapiens
RSQHCKPEE

SEQ ID NO: 127831 - protein, 9 aa, Homo sapiens
SQHCKPEEG

SEQ ID NO: 127832 - protein, 9 aa, Homo sapiens
QHCKPEEGL

SEQ ID NO: 127833 - protein, 9 aa, Homo sapiens
HCKPEEGLE

SEQ ID NO: 127834 - protein, 9 aa, Homo sapiens
CKPEEGLEA

SEQ ID NO: 127835 - protein, 9 aa, Homo sapiens
KPEEGLEAR

SEQ ID NO: 127836 - protein, 9 aa, Homo sapiens
PEEGLEARG

SEQ ID NO: 127837 - protein, 9 aa, Homo sapiens
EEGLEARGE

SEQ ID NO: 127838 - protein, 9 aa, Homo sapiens
EGLEARGEA

SEQ ID NO: 127839 - protein, 9 aa, Homo sapiens
GLEARGEAL

SEQ ID NO: 127840 - protein, 9 aa, Homo sapiens
LEARGEALG

SEQ ID NO: 127841 - protein, 9 aa, Homo sapiens
EARGEALGL

SEQ ID NO: 127842 - protein, 9 aa, Homo sapiens
ARGEALGLV

SEQ ID NO: 127843 - protein, 9 aa, Homo sapiens
RGEALGLVG

SEQ ID NO: 127844 - protein, 9 aa, Homo sapiens
GEALGLVGA

SEQ ID NO: 127845 - protein, 9 aa, Homo sapiens
EALGLVGAQ

SEQ ID NO: 127846 - protein, 9 aa, Homo sapiens
ALGLVGAQA

SEQ ID NO: 127847 - protein, 9 aa, Homo sapiens
LGLVGAQAP

SEQ ID NO: 127848 - protein, 9 aa, Homo sapiens
GLVGAQAPA

SEQ ID NO: 127849 - protein, 9 aa, Homo sapiens
LVGAQAPAT

SEQ ID NO: 127850 - protein, 9 aa, Homo sapiens
VGAQAPATE

SEQ ID NO: 127851 - protein, 9 aa, Homo sapiens
GAQAPATEE

SEQ ID NO: 127852 - protein, 9 aa, Homo sapiens
AQAPATEEQ

SEQ ID NO: 127853 - protein, 9 aa, Homo sapiens
QAPATEEQE

SEQ ID NO: 127854 - protein, 9 aa, Homo sapiens
APATEEQEA

SEQ ID NO: 127855 - protein, 9 aa, Homo sapiens
PATEEQEAA

SEQ ID NO: 127856 - protein, 9 aa, Homo sapiens
ATEEQEAAS

SEQ ID NO: 127857 - protein, 9 aa, Homo sapiens
TEEQEAASS

SEQ ID NO: 127858 - protein, 9 aa, Homo sapiens
EEQEAASSS

SEQ ID NO: 127859 - protein, 9 aa, Homo sapiens
EQEAASSSS

SEQ ID NO: 127860 - protein, 9 aa, Homo sapiens
QEAASSSST

SEQ ID NO: 127861 - protein, 9 aa, Homo sapiens
EAASSSSTL

SEQ ID NO: 127862 - protein, 9 aa, Homo sapiens
AASSSSTLV

SEQ ID NO: 127863 - protein, 9 aa, Homo sapiens
ASSSSTLVE

SEQ ID NO: 127864 - protein, 9 aa, Homo sapiens
SSSSTLVEV

SEQ ID NO: 127865 - protein, 9 aa, Homo sapiens
SSSTLVEVT

SEQ ID NO: 127866 - protein, 9 aa, Homo sapiens
SSTLVEVTL

SEQ ID NO: 127867 - protein, 9 aa, Homo sapiens
STLVEVTLG

SEQ ID NO: 127868 - protein, 9 aa, Homo sapiens
TLVEVTLGE

SEQ ID NO: 127869 - protein, 9 aa, Homo sapiens
LVEVTLGEV

SEQ ID NO: 127870 - protein, 9 aa, Homo sapiens
VEVTLGEVP

SEQ ID NO: 127871 - protein, 9 aa, Homo sapiens
EVTLGEVPA

SEQ ID NO: 127872 - protein, 9 aa, Homo sapiens
VTLGEVPAA

SEQ ID NO: 127873 - protein, 9 aa, Homo sapiens
TLGEVPAAE

SEQ ID NO: 127874 - protein, 9 aa, Homo sapiens
LGEVPAAES

SEQ ID NO: 127875 - protein, 9 aa, Homo sapiens
GEVPAAESP

SEQ ID NO: 127876 - protein, 9 aa, Homo sapiens
EVPAAESPD

SEQ ID NO: 127877 - protein, 9 aa, Homo sapiens
VPAAESPDP

SEQ ID NO: 127878 - protein, 9 aa, Homo sapiens
PAAESPDPP

SEQ ID NO: 127879 - protein, 9 aa, Homo sapiens
AAESPDPPQ

SEQ ID NO: 127880 - protein, 9 aa, Homo sapiens
AESPDPPQS

SEQ ID NO: 127881 - protein, 9 aa, Homo sapiens
ESPDPPQSP

SEQ ID NO: 127882 - protein, 9 aa, Homo sapiens
SPDPPQSPQ

SEQ ID NO: 127883 - protein, 9 aa, Homo sapiens
PDPPQSPQG

SEQ ID NO: 127884 - protein, 9 aa, Homo sapiens
DPPQSPQGA

SEQ ID NO: 127885 - protein, 9 aa, Homo sapiens
PPQSPQGAS

SEQ ID NO: 127886 - protein, 9 aa, Homo sapiens
PQSPQGASS

SEQ ID NO: 127887 - protein, 9 aa, Homo sapiens
QSPQGASSL

SEQ ID NO: 127888 - protein, 9 aa, Homo sapiens
SPQGASSLP

SEQ ID NO: 127889 - protein, 9 aa, Homo sapiens
PQGASSLPT

SEQ ID NO: 127890 - protein, 9 aa, Homo sapiens
QGASSLPTT

SEQ ID NO: 127891 - protein, 9 aa, Homo sapiens
GASSLPTTM

SEQ ID NO: 127892 - protein, 9 aa, Homo sapiens
ASSLPTTMN

SEQ ID NO: 127893 - protein, 9 aa, Homo sapiens
SSLPTTMNY

SEQ ID NO: 127894 - protein, 9 aa, Homo sapiens
SLPTTMNYP

SEQ ID NO: 127895 - protein, 9 aa, Homo sapiens
LPTTMNYPL

SEQ ID NO: 127896 - protein, 9 aa, Homo sapiens
PTTMNYPLW

SEQ ID NO: 127897 - protein, 9 aa, Homo sapiens
TTMNYPLWS

SEQ ID NO: 127898 - protein, 9 aa, Homo sapiens
TMNYPLWSQ

SEQ ID NO: 127899 - protein, 9 aa, Homo sapiens
MNYPLWSQS

SEQ ID NO: 127900 - protein, 9 aa, Homo sapiens
NYPLWSQSY

SEQ ID NO: 127901 - protein, 9 aa, Homo sapiens
YPLWSQSYE

SEQ ID NO: 127902 - protein, 9 aa, Homo sapiens
PLWSQSYED

SEQ ID NO: 127903 - protein, 9 aa, Homo sapiens
LWSQSYEDS

SEQ ID NO: 127904 - protein, 9 aa, Homo sapiens
WSQSYEDSS

SEQ ID NO: 127905 - protein, 9 aa, Homo sapiens
SQSYEDSSN

SEQ ID NO: 127906 - protein, 9 aa, Homo sapiens
QSYEDSSNQ

SEQ ID NO: 127907 - protein, 9 aa, Homo sapiens
SYEDSSNQE

SEQ ID NO: 127908 - protein, 9 aa, Homo sapiens
YEDSSNQEE

SEQ ID NO: 127909 - protein, 9 aa, Homo sapiens
EDSSNQEEE

SEQ ID NO: 127910 - protein, 9 aa, Homo sapiens
DSSNQEEEG

SEQ ID NO: 127911 - protein, 9 aa, Homo sapiens
SSNQEEEGP

SEQ ID NO: 127912 - protein, 9 aa, Homo sapiens
SNQEEEGPS

SEQ ID NO: 127913 - protein, 9 aa, Homo sapiens
NQEEEGPST

SEQ ID NO: 127914 - protein, 9 aa, Homo sapiens
QEEEGPSTF

SEQ ID NO: 127915 - protein, 9 aa, Homo sapiens
EEEGPSTFP

SEQ ID NO: 127916 - protein, 9 aa, Homo sapiens
EEGPSTFPD

SEQ ID NO: 127917 - protein, 9 aa, Homo sapiens
EGPSTFPDL

SEQ ID NO: 127918 - protein, 9 aa, Homo sapiens
GPSTFPDLE

SEQ ID NO: 127919 - protein, 9 aa, Homo sapiens
PSTFPDLES

SEQ ID NO: 127920 - protein, 9 aa, Homo sapiens
STFPDLESE

SEQ ID NO: 127921 - protein, 9 aa, Homo sapiens
TFPDLESEF

SEQ ID NO: 127922 - protein, 9 aa, Homo sapiens
FPDLESEFQ

SEQ ID NO: 127923 - protein, 9 aa, Homo sapiens
PDLESEFQA

SEQ ID NO: 127924 - protein, 9 aa, Homo sapiens
DLESEFQAA

SEQ ID NO: 127925 - protein, 9 aa, Homo sapiens
LESEFQAAL

SEQ ID NO: 127926 - protein, 9 aa, Homo sapiens
ESEFQAALS

SEQ ID NO: 127927 - protein, 9 aa, Homo sapiens
SEFQAALSR

SEQ ID NO: 127928 - protein, 9 aa, Homo sapiens
EFQAALSRK

SEQ ID NO: 127929 - protein, 9 aa, Homo sapiens
FQAALSRKV

SEQ ID NO: 127930 - protein, 9 aa, Homo sapiens
QAALSRKVA

SEQ ID NO: 127931 - protein, 9 aa, Homo sapiens
AALSRKVAK

SEQ ID NO: 127932 - protein, 9 aa, Homo sapiens
ALSRKVAKL

SEQ ID NO: 127933 - protein, 9 aa, Homo sapiens
LSRKVAKLV

SEQ ID NO: 127934 - protein, 9 aa, Homo sapiens
SRKVAKLVH

SEQ ID NO: 127935 - protein, 9 aa, Homo sapiens
RKVAKLVHF

SEQ ID NO: 127936 - protein, 9 aa, Homo sapiens
KVAKLVHFL

SEQ ID NO: 127937 - protein, 9 aa, Homo sapiens
VAKLVHFLL

SEQ ID NO: 127938 - protein, 9 aa, Homo sapiens
AKLVHFLLL

SEQ ID NO: 127939 - protein, 9 aa, Homo sapiens
KLVHFLLLK

SEQ ID NO: 127940 - protein, 9 aa, Homo sapiens
LVHFLLLKY

SEQ ID NO: 127941 - protein, 9 aa, Homo sapiens
VHFLLLKYR

SEQ ID NO: 127942 - protein, 9 aa, Homo sapiens
HFLLLKYRA

SEQ ID NO: 127943 - protein, 9 aa, Homo sapiens
FLLLKYRAR

SEQ ID NO: 127944 - protein, 9 aa, Homo sapiens
LLLKYRARE

SEQ ID NO: 127945 - protein, 9 aa, Homo sapiens
LLKYRAREP

SEQ ID NO: 127946 - protein, 9 aa, Homo sapiens
LKYRAREPV

SEQ ID NO: 127947 - protein, 9 aa, Homo sapiens
KYRAREPVT

SEQ ID NO: 127948 - protein, 9 aa, Homo sapiens
YRAREPVTK

SEQ ID NO: 127949 - protein, 9 aa, Homo sapiens
RAREPVTKA

SEQ ID NO: 127950 - protein, 9 aa, Homo sapiens
AREPVTKAE

SEQ ID NO: 127951 - protein, 9 aa, Homo sapiens
REPVTKAEM

SEQ ID NO: 127952 - protein, 9 aa, Homo sapiens
EPVTKAEML

SEQ ID NO: 127953 - protein, 9 aa, Homo sapiens
PVTKAEMLG

SEQ ID NO: 127954 - protein, 9 aa, Homo sapiens
VTKAEMLGS

SEQ ID NO: 127955 - protein, 9 aa, Homo sapiens
TKAEMLGSV

SEQ ID NO: 127956 - protein, 9 aa, Homo sapiens
KAEMLGSVV

SEQ ID NO: 127957 - protein, 9 aa, Homo sapiens
AEMLGSVVG

SEQ ID NO: 127958 - protein, 9 aa, Homo sapiens
EMLGSVVGN

SEQ ID NO: 127959 - protein, 9 aa, Homo sapiens
MLGSVVGNW

SEQ ID NO: 127960 - protein, 9 aa, Homo sapiens
LGSVVGNWQ

SEQ ID NO: 127961 - protein, 9 aa, Homo sapiens
GSVVGNWQY

SEQ ID NO: 127962 - protein, 9 aa, Homo sapiens
SVVGNWQYF

SEQ ID NO: 127963 - protein, 9 aa, Homo sapiens
VVGNWQYFF

SEQ ID NO: 127964 - protein, 9 aa, Homo sapiens
VGNWQYFFP

SEQ ID NO: 127965 - protein, 9 aa, Homo sapiens
GNWQYFFPV

SEQ ID NO: 127966 - protein, 9 aa, Homo sapiens
NWQYFFPVI

SEQ ID NO: 127967 - protein, 9 aa, Homo sapiens
WQYFFPVIF

SEQ ID NO: 127968 - protein, 9 aa, Homo sapiens
QYFFPVIFS

SEQ ID NO: 127969 - protein, 9 aa, Homo sapiens
YFFPVIFSK

SEQ ID NO: 127970 - protein, 9 aa, Homo sapiens
FFPVIFSKA

SEQ ID NO: 127971 - protein, 9 aa, Homo sapiens
FPVIFSKAS

SEQ ID NO: 127972 - protein, 9 aa, Homo sapiens
PVIFSKASD

SEQ ID NO: 127973 - protein, 9 aa, Homo sapiens
VIFSKASDS

SEQ ID NO: 127974 - protein, 9 aa, Homo sapiens
IFSKASDSL

SEQ ID NO: 127975 - protein, 9 aa, Homo sapiens
FSKASDSLQ

SEQ ID NO: 127976 - protein, 9 aa, Homo sapiens
SKASDSLQL

SEQ ID NO: 127977 - protein, 9 aa, Homo sapiens
KASDSLQLV

SEQ ID NO: 127978 - protein, 9 aa, Homo sapiens
ASDSLQLVF

SEQ ID NO: 127979 - protein, 9 aa, Homo sapiens
SDSLQLVFG

SEQ ID NO: 127980 - protein, 9 aa, Homo sapiens
DSLQLVFGI

SEQ ID NO: 127981 - protein, 9 aa, Homo sapiens
SLQLVFGIE

SEQ ID NO: 127982 - protein, 9 aa, Homo sapiens
LQLVFGIEL

SEQ ID NO: 127983 - protein, 9 aa, Homo sapiens
QLVFGIELM

SEQ ID NO: 127984 - protein, 9 aa, Homo sapiens
LVFGIELME

SEQ ID NO: 127985 - protein, 9 aa, Homo sapiens
VFGIELMEV

SEQ ID NO: 127986 - protein, 9 aa, Homo sapiens
FGIELMEVD

SEQ ID NO: 127987 - protein, 9 aa, Homo sapiens
GIELMEVDP

SEQ ID NO: 127988 - protein, 9 aa, Homo sapiens
IELMEVDPI

SEQ ID NO: 127989 - protein, 9 aa, Homo sapiens
ELMEVDPIG

SEQ ID NO: 127990 - protein, 9 aa, Homo sapiens
LMEVDPIGH

SEQ ID NO: 127991 - protein, 9 aa, Homo sapiens
MEVDPIGHV

SEQ ID NO: 127992 - protein, 9 aa, Homo sapiens
EVDPIGHVY

SEQ ID NO: 127993 - protein, 9 aa, Homo sapiens
VDPIGHVYI

SEQ ID NO: 127994 - protein, 9 aa, Homo sapiens
DPIGHVYIF

SEQ ID NO: 127995 - protein, 9 aa, Homo sapiens
PIGHVYIFA

SEQ ID NO: 127996 - protein, 9 aa, Homo sapiens
IGHVYIFAT

SEQ ID NO: 127997 - protein, 9 aa, Homo sapiens
GHVYIFATC

SEQ ID NO: 127998 - protein, 9 aa, Homo sapiens
HVYIFATCL

SEQ ID NO: 127999 - protein, 9 aa, Homo sapiens
VYIFATCLG

SEQ ID NO: 128000 - protein, 9 aa, Homo sapiens
YIFATCLGL

SEQ ID NO: 128001 - protein, 9 aa, Homo sapiens
IFATCLGLS

SEQ ID NO: 128002 - protein, 9 aa, Homo sapiens
FATCLGLSY

SEQ ID NO: 128003 - protein, 9 aa, Homo sapiens
ATCLGLSYD

SEQ ID NO: 128004 - protein, 9 aa, Homo sapiens
TCLGLSYDG

SEQ ID NO: 128005 - protein, 9 aa, Homo sapiens
CLGLSYDGL

SEQ ID NO: 128006 - protein, 9 aa, Homo sapiens
LGLSYDGLL

SEQ ID NO: 128007 - protein, 9 aa, Homo sapiens
GLSYDGLLG

SEQ ID NO: 128008 - protein, 9 aa, Homo sapiens
LSYDGLLGD

SEQ ID NO: 128009 - protein, 9 aa, Homo sapiens
SYDGLLGDN

SEQ ID NO: 128010 - protein, 9 aa, Homo sapiens
YDGLLGDNQ

SEQ ID NO: 128011 - protein, 9 aa, Homo sapiens
DGLLGDNQI

SEQ ID NO: 128012 - protein, 9 aa, Homo sapiens
GLLGDNQIM

SEQ ID NO: 128013 - protein, 9 aa, Homo sapiens
LLGDNQIMP

SEQ ID NO: 128014 - protein, 9 aa, Homo sapiens
LGDNQIMPK

SEQ ID NO: 128015 - protein, 9 aa, Homo sapiens
GDNQIMPKT

SEQ ID NO: 128016 - protein, 9 aa, Homo sapiens
DNQIMPKTG

SEQ ID NO: 128017 - protein, 9 aa, Homo sapiens
NQIMPKTGF

SEQ ID NO: 128018 - protein, 9 aa, Homo sapiens
QIMPKTGFL

SEQ ID NO: 128019 - protein, 9 aa, Homo sapiens
IMPKTGFLI

SEQ ID NO: 128020 - protein, 9 aa, Homo sapiens
MPKTGFLII

SEQ ID NO: 128021 - protein, 9 aa, Homo sapiens
PKTGFLIII

SEQ ID NO: 128022 - protein, 9 aa, Homo sapiens
KTGFLIIIL

SEQ ID NO: 128023 - protein, 9 aa, Homo sapiens
TGFLIIILA

SEQ ID NO: 128024 - protein, 9 aa, Homo sapiens
GFLIIILAI

SEQ ID NO: 128025 - protein, 9 aa, Homo sapiens
FLIIILAII

SEQ ID NO: 128026 - protein, 9 aa, Homo sapiens
LIIILAIIA

SEQ ID NO: 128027 - protein, 9 aa, Homo sapiens
IIILAIIAK

SEQ ID NO: 128028 - protein, 9 aa, Homo sapiens
IILAIIAKE

SEQ ID NO: 128029 - protein, 9 aa, Homo sapiens
ILAIIAKEG

SEQ ID NO: 128030 - protein, 9 aa, Homo sapiens
LAIIAKEGD

SEQ ID NO: 128031 - protein, 9 aa, Homo sapiens
AIIAKEGDC

SEQ ID NO: 128032 - protein, 9 aa, Homo sapiens
IIAKEGDCA

SEQ ID NO: 128033 - protein, 9 aa, Homo sapiens
IAKEGDCAP

SEQ ID NO: 128034 - protein, 9 aa, Homo sapiens
AKEGDCAPE

SEQ ID NO: 128035 - protein, 9 aa, Homo sapiens
KEGDCAPEE

SEQ ID NO: 128036 - protein, 9 aa, Homo sapiens
EGDCAPEEK

SEQ ID NO: 128037 - protein, 9 aa, Homo sapiens
GDCAPEEKI

SEQ ID NO: 128038 - protein, 9 aa, Homo sapiens
DCAPEEKIW

SEQ ID NO: 128039 - protein, 9 aa, Homo sapiens
CAPEEKIWE

SEQ ID NO: 128040 - protein, 9 aa, Homo sapiens
APEEKIWEE

SEQ ID NO: 128041 - protein, 9 aa, Homo sapiens
PEEKIWEEL

SEQ ID NO: 128042 - protein, 9 aa, Homo sapiens
EEKIWEELS

SEQ ID NO: 128043 - protein, 9 aa, Homo sapiens
EKIWEELSV

SEQ ID NO: 128044 - protein, 9 aa, Homo sapiens
KIWEELSVL

SEQ ID NO: 128045 - protein, 9 aa, Homo sapiens
IWEELSVLE

SEQ ID NO: 128046 - protein, 9 aa, Homo sapiens
WEELSVLEV

SEQ ID NO: 128047 - protein, 9 aa, Homo sapiens
EELSVLEVF

SEQ ID NO: 128048 - protein, 9 aa, Homo sapiens
ELSVLEVFE

SEQ ID NO: 128049 - protein, 9 aa, Homo sapiens
LSVLEVFEG

SEQ ID NO: 128050 - protein, 9 aa, Homo sapiens
SVLEVFEGR

SEQ ID NO: 128051 - protein, 9 aa, Homo sapiens
VLEVFEGRE

SEQ ID NO: 128052 - protein, 9 aa, Homo sapiens
LEVFEGRED

SEQ ID NO: 128053 - protein, 9 aa, Homo sapiens
EVFEGREDS

SEQ ID NO: 128054 - protein, 9 aa, Homo sapiens
VFEGREDSI

SEQ ID NO: 128055 - protein, 9 aa, Homo sapiens
FEGREDSIF

SEQ ID NO: 128056 - protein, 9 aa, Homo sapiens
EGREDSIFG

SEQ ID NO: 128057 - protein, 9 aa, Homo sapiens
GREDSIFGD

SEQ ID NO: 128058 - protein, 9 aa, Homo sapiens
REDSIFGDP

SEQ ID NO: 128059 - protein, 9 aa, Homo sapiens
EDSIFGDPK

SEQ ID NO: 128060 - protein, 9 aa, Homo sapiens
DSIFGDPKK

SEQ ID NO: 128061 - protein, 9 aa, Homo sapiens
SIFGDPKKL

SEQ ID NO: 128062 - protein, 9 aa, Homo sapiens
IFGDPKKLL

SEQ ID NO: 128063 - protein, 9 aa, Homo sapiens
FGDPKKLLT

SEQ ID NO: 128064 - protein, 9 aa, Homo sapiens
GDPKKLLTQ

SEQ ID NO: 128065 - protein, 9 aa, Homo sapiens
DPKKLLTQY

SEQ ID NO: 128066 - protein, 9 aa, Homo sapiens
PKKLLTQYF

SEQ ID NO: 128067 - protein, 9 aa, Homo sapiens
KKLLTQYFV

SEQ ID NO: 128068 - protein, 9 aa, Homo sapiens
KLLTQYFVQ

SEQ ID NO: 128069 - protein, 9 aa, Homo sapiens
LLTQYFVQE

SEQ ID NO: 128070 - protein, 9 aa, Homo sapiens
LTQYFVQEN

SEQ ID NO: 128071 - protein, 9 aa, Homo sapiens
TQYFVQENY

SEQ ID NO: 128072 - protein, 9 aa, Homo sapiens
QYFVQENYL

SEQ ID NO: 128073 - protein, 9 aa, Homo sapiens
YFVQENYLE

SEQ ID NO: 128074 - protein, 9 aa, Homo sapiens
FVQENYLEY

SEQ ID NO: 128075 - protein, 9 aa, Homo sapiens
VQENYLEYR

SEQ ID NO: 128076 - protein, 9 aa, Homo sapiens
QENYLEYRQ

SEQ ID NO: 128077 - protein, 9 aa, Homo sapiens
ENYLEYRQV

SEQ ID NO: 128078 - protein, 9 aa, Homo sapiens
NYLEYRQVP

SEQ ID NO: 128079 - protein, 9 aa, Homo sapiens
YLEYRQVPG

SEQ ID NO: 128080 - protein, 9 aa, Homo sapiens
LEYRQVPGS

SEQ ID NO: 128081 - protein, 9 aa, Homo sapiens
EYRQVPGSD

SEQ ID NO: 128082 - protein, 9 aa, Homo sapiens
YRQVPGSDP

SEQ ID NO: 128083 - protein, 9 aa, Homo sapiens
RQVPGSDPA

SEQ ID NO: 128084 - protein, 9 aa, Homo sapiens
QVPGSDPAC

SEQ ID NO: 128085 - protein, 9 aa, Homo sapiens
VPGSDPACY

SEQ ID NO: 128086 - protein, 9 aa, Homo sapiens
PGSDPACYE

SEQ ID NO: 128087 - protein, 9 aa, Homo sapiens
GSDPACYEF

SEQ ID NO: 128088 - protein, 9 aa, Homo sapiens
SDPACYEFL

SEQ ID NO: 128089 - protein, 9 aa, Homo sapiens
DPACYEFLW

SEQ ID NO: 128090 - protein, 9 aa, Homo sapiens
PACYEFLWG

SEQ ID NO: 128091 - protein, 9 aa, Homo sapiens
ACYEFLWGP

SEQ ID NO: 128092 - protein, 9 aa, Homo sapiens
CYEFLWGPR

SEQ ID NO: 128093 - protein, 9 aa, Homo sapiens
YEFLWGPRA

SEQ ID NO: 128094 - protein, 9 aa, Homo sapiens
EFLWGPRAL

SEQ ID NO: 128095 - protein, 9 aa, Homo sapiens
FLWGPRALI

SEQ ID NO: 128096 - protein, 9 aa, Homo sapiens
LWGPRALIE

SEQ ID NO: 128097 - protein, 9 aa, Homo sapiens
WGPRALIET

SEQ ID NO: 128098 - protein, 9 aa, Homo sapiens
GPRALIETS

SEQ ID NO: 128099 - protein, 9 aa, Homo sapiens
PRALIETSY

SEQ ID NO: 128100 - protein, 9 aa, Homo sapiens
RALIETSYV

SEQ ID NO: 128101 - protein, 9 aa, Homo sapiens
ALIETSYVK

SEQ ID NO: 128102 - protein, 9 aa, Homo sapiens
LIETSYVKV

SEQ ID NO: 128103 - protein, 9 aa, Homo sapiens
IETSYVKVL

SEQ ID NO: 128104 - protein, 9 aa, Homo sapiens
ETSYVKVLH

SEQ ID NO: 128105 - protein, 9 aa, Homo sapiens
TSYVKVLHH

SEQ ID NO: 128106 - protein, 9 aa, Homo sapiens
SYVKVLHHM

SEQ ID NO: 128107 - protein, 9 aa, Homo sapiens
YVKVLHHMV

SEQ ID NO: 128108 - protein, 9 aa, Homo sapiens
VKVLHHMVK

SEQ ID NO: 128109 - protein, 9 aa, Homo sapiens
KVLHHMVKI

SEQ ID NO: 128110 - protein, 9 aa, Homo sapiens
VLHHMVKIS

SEQ ID NO: 128111 - protein, 9 aa, Homo sapiens
LHHMVKISG

SEQ ID NO: 128112 - protein, 9 aa, Homo sapiens
HHMVKISGG

SEQ ID NO: 128113 - protein, 9 aa, Homo sapiens
HMVKISGGP

SEQ ID NO: 128114 - protein, 9 aa, Homo sapiens
MVKISGGPR

SEQ ID NO: 128115 - protein, 9 aa, Homo sapiens
VKISGGPRI

SEQ ID NO: 128116 - protein, 9 aa, Homo sapiens
KISGGPRIS

SEQ ID NO: 128117 - protein, 9 aa, Homo sapiens
ISGGPRISY

SEQ ID NO: 128118 - protein, 9 aa, Homo sapiens
SGGPRISYP

SEQ ID NO: 128119 - protein, 9 aa, Homo sapiens
GGPRISYPL

SEQ ID NO: 128120 - protein, 9 aa, Homo sapiens
GPRISYPLL

SEQ ID NO: 128121 - protein, 9 aa, Homo sapiens
PRISYPLLH

SEQ ID NO: 128122 - protein, 9 aa, Homo sapiens
RISYPLLHE

SEQ ID NO: 128123 - protein, 9 aa, Homo sapiens
ISYPLLHEW

SEQ ID NO: 128124 - protein, 9 aa, Homo sapiens
SYPLLHEWA

SEQ ID NO: 128125 - protein, 9 aa, Homo sapiens
YPLLHEWAL

SEQ ID NO: 128126 - protein, 9 aa, Homo sapiens
PLLHEWALR

SEQ ID NO: 128127 - protein, 9 aa, Homo sapiens
LLHEWALRE

SEQ ID NO: 128128 - protein, 9 aa, Homo sapiens
LHEWALREG

SEQ ID NO: 128129 - protein, 9 aa, Homo sapiens
HEWALREGE

SEQ ID NO: 128130 - protein, 9 aa, Homo sapiens
EWALREGEE

SEQ ID NO: 128131 - protein, 9 aa, Homo sapiens
MPLEQRSQH

SEQ ID NO: 128132 - protein, 9 aa, Homo sapiens
PLEQRSQHC

SEQ ID NO: 128133 - protein, 9 aa, Homo sapiens
LEQRSQHCK

SEQ ID NO: 128134 - protein, 9 aa, Homo sapiens
EQRSQHCKP

SEQ ID NO: 128135 - protein, 9 aa, Homo sapiens
QRSQHCKPE

SEQ ID NO: 128136 - protein, 9 aa, Homo sapiens
RSQHCKPEE

SEQ ID NO: 128137 - protein, 9 aa, Homo sapiens
SQHCKPEEG

SEQ ID NO: 128138 - protein, 9 aa, Homo sapiens
QHCKPEEGL

SEQ ID NO: 128139 - protein, 9 aa, Homo sapiens
HCKPEEGLE

SEQ ID NO: 128140 - protein, 9 aa, Homo sapiens
CKPEEGLEA

SEQ ID NO: 128141 - protein, 9 aa, Homo sapiens
KPEEGLEAQ

SEQ ID NO: 128142 - protein, 9 aa, Homo sapiens
PEEGLEAQG

SEQ ID NO: 128143 - protein, 9 aa, Homo sapiens
EEGLEAQGE

SEQ ID NO: 128144 - protein, 9 aa, Homo sapiens
EGLEAQGEA

SEQ ID NO: 128145 - protein, 9 aa, Homo sapiens
GLEAQGEAL

SEQ ID NO: 128146 - protein, 9 aa, Homo sapiens
LEAQGEALG

SEQ ID NO: 128147 - protein, 9 aa, Homo sapiens
EAQGEALGL

SEQ ID NO: 128148 - protein, 9 aa, Homo sapiens
AQGEALGLV

SEQ ID NO: 128149 - protein, 9 aa, Homo sapiens
QGEALGLVG

SEQ ID NO: 128150 - protein, 9 aa, Homo sapiens
GEALGLVGA

SEQ ID NO: 128151 - protein, 9 aa, Homo sapiens
EALGLVGAQ

SEQ ID NO: 128152 - protein, 9 aa, Homo sapiens
ALGLVGAQA

SEQ ID NO: 128153 - protein, 9 aa, Homo sapiens
LGLVGAQAP

SEQ ID NO: 128154 - protein, 9 aa, Homo sapiens
GLVGAQAPA

SEQ ID NO: 128155 - protein, 9 aa, Homo sapiens
LVGAQAPAT

SEQ ID NO: 128156 - protein, 9 aa, Homo sapiens
VGAQAPATE

SEQ ID NO: 128157 - protein, 9 aa, Homo sapiens
GAQAPATEE

SEQ ID NO: 128158 - protein, 9 aa, Homo sapiens
AQAPATEEQ

SEQ ID NO: 128159 - protein, 9 aa, Homo sapiens
QAPATEEQE

SEQ ID NO: 128160 - protein, 9 aa, Homo sapiens
APATEEQET

SEQ ID NO: 128161 - protein, 9 aa, Homo sapiens
PATEEQETA

SEQ ID NO: 128162 - protein, 9 aa, Homo sapiens
ATEEQETAS

SEQ ID NO: 128163 - protein, 9 aa, Homo sapiens
TEEQETASS

SEQ ID NO: 128164 - protein, 9 aa, Homo sapiens
EEQETASSS

SEQ ID NO: 128165 - protein, 9 aa, Homo sapiens
EQETASSSS

SEQ ID NO: 128166 - protein, 9 aa, Homo sapiens
QETASSSST

SEQ ID NO: 128167 - protein, 9 aa, Homo sapiens
ETASSSSTL

SEQ ID NO: 128168 - protein, 9 aa, Homo sapiens
TASSSSTLV

SEQ ID NO: 128169 - protein, 9 aa, Homo sapiens
ASSSSTLVE

SEQ ID NO: 128170 - protein, 9 aa, Homo sapiens
SSSSTLVEV

SEQ ID NO: 128171 - protein, 9 aa, Homo sapiens
SSSTLVEVT

SEQ ID NO: 128172 - protein, 9 aa, Homo sapiens
SSTLVEVTL

SEQ ID NO: 128173 - protein, 9 aa, Homo sapiens
STLVEVTLR

SEQ ID NO: 128174 - protein, 9 aa, Homo sapiens
TLVEVTLRE

SEQ ID NO: 128175 - protein, 9 aa, Homo sapiens
LVEVTLREV

SEQ ID NO: 128176 - protein, 9 aa, Homo sapiens
VEVTLREVP

SEQ ID NO: 128177 - protein, 9 aa, Homo sapiens
EVTLREVPA

SEQ ID NO: 128178 - protein, 9 aa, Homo sapiens
VTLREVPAA

SEQ ID NO: 128179 - protein, 9 aa, Homo sapiens
TLREVPAAE

SEQ ID NO: 128180 - protein, 9 aa, Homo sapiens
LREVPAAES

SEQ ID NO: 128181 - protein, 9 aa, Homo sapiens
REVPAAESP

SEQ ID NO: 128182 - protein, 9 aa, Homo sapiens
EVPAAESPS

SEQ ID NO: 128183 - protein, 9 aa, Homo sapiens
VPAAESPSP

SEQ ID NO: 128184 - protein, 9 aa, Homo sapiens
PAAESPSPP

SEQ ID NO: 128185 - protein, 9 aa, Homo sapiens
AAESPSPPH

SEQ ID NO: 128186 - protein, 9 aa, Homo sapiens
AESPSPPHS

SEQ ID NO: 128187 - protein, 9 aa, Homo sapiens
ESPSPPHSP

SEQ ID NO: 128188 - protein, 9 aa, Homo sapiens
SPSPPHSPQ

SEQ ID NO: 128189 - protein, 9 aa, Homo sapiens
PSPPHSPQG

SEQ ID NO: 128190 - protein, 9 aa, Homo sapiens
SPPHSPQGA

SEQ ID NO: 128191 - protein, 9 aa, Homo sapiens
PPHSPQGAS

SEQ ID NO: 128192 - protein, 9 aa, Homo sapiens
PHSPQGAST

SEQ ID NO: 128193 - protein, 9 aa, Homo sapiens
HSPQGASTL

SEQ ID NO: 128194 - protein, 9 aa, Homo sapiens
SPQGASTLP

SEQ ID NO: 128195 - protein, 9 aa, Homo sapiens
PQGASTLPT

SEQ ID NO: 128196 - protein, 9 aa, Homo sapiens
QGASTLPTT

SEQ ID NO: 128197 - protein, 9 aa, Homo sapiens
GASTLPTTI

SEQ ID NO: 128198 - protein, 9 aa, Homo sapiens
ASTLPTTIN

SEQ ID NO: 128199 - protein, 9 aa, Homo sapiens
STLPTTINY

SEQ ID NO: 128200 - protein, 9 aa, Homo sapiens
TLPTTINYT

SEQ ID NO: 128201 - protein, 9 aa, Homo sapiens
LPTTINYTL

SEQ ID NO: 128202 - protein, 9 aa, Homo sapiens
PTTINYTLW

SEQ ID NO: 128203 - protein, 9 aa, Homo sapiens
TTINYTLWS

SEQ ID NO: 128204 - protein, 9 aa, Homo sapiens
TINYTLWSQ

SEQ ID NO: 128205 - protein, 9 aa, Homo sapiens
INYTLWSQS

SEQ ID NO: 128206 - protein, 9 aa, Homo sapiens
NYTLWSQSD

SEQ ID NO: 128207 - protein, 9 aa, Homo sapiens
YTLWSQSDE

SEQ ID NO: 128208 - protein, 9 aa, Homo sapiens
TLWSQSDEG

SEQ ID NO: 128209 - protein, 9 aa, Homo sapiens
LWSQSDEGS

SEQ ID NO: 128210 - protein, 9 aa, Homo sapiens
WSQSDEGSS

SEQ ID NO: 128211 - protein, 9 aa, Homo sapiens
SQSDEGSSN

SEQ ID NO: 128212 - protein, 9 aa, Homo sapiens
QSDEGSSNE

SEQ ID NO: 128213 - protein, 9 aa, Homo sapiens
SDEGSSNEE

SEQ ID NO: 128214 - protein, 9 aa, Homo sapiens
DEGSSNEEQ

SEQ ID NO: 128215 - protein, 9 aa, Homo sapiens
EGSSNEEQE

SEQ ID NO: 128216 - protein, 9 aa, Homo sapiens
GSSNEEQEG

SEQ ID NO: 128217 - protein, 9 aa, Homo sapiens
SSNEEQEGP

SEQ ID NO: 128218 - protein, 9 aa, Homo sapiens
SNEEQEGPS

SEQ ID NO: 128219 - protein, 9 aa, Homo sapiens
NEEQEGPST

SEQ ID NO: 128220 - protein, 9 aa, Homo sapiens
EEQEGPSTF

SEQ ID NO: 128221 - protein, 9 aa, Homo sapiens
EQEGPSTFP

SEQ ID NO: 128222 - protein, 9 aa, Homo sapiens
QEGPSTFPD

SEQ ID NO: 128223 - protein, 9 aa, Homo sapiens
EGPSTFPDL

SEQ ID NO: 128224 - protein, 9 aa, Homo sapiens
GPSTFPDLE

SEQ ID NO: 128225 - protein, 9 aa, Homo sapiens
PSTFPDLET

SEQ ID NO: 128226 - protein, 9 aa, Homo sapiens
STFPDLETS

SEQ ID NO: 128227 - protein, 9 aa, Homo sapiens
TFPDLETSF

SEQ ID NO: 128228 - protein, 9 aa, Homo sapiens
FPDLETSFQ

SEQ ID NO: 128229 - protein, 9 aa, Homo sapiens
PDLETSFQV

SEQ ID NO: 128230 - protein, 9 aa, Homo sapiens
DLETSFQVA

SEQ ID NO: 128231 - protein, 9 aa, Homo sapiens
LETSFQVAL

SEQ ID NO: 128232 - protein, 9 aa, Homo sapiens
ETSFQVALS

SEQ ID NO: 128233 - protein, 9 aa, Homo sapiens
TSFQVALSR

SEQ ID NO: 128234 - protein, 9 aa, Homo sapiens
SFQVALSRK

SEQ ID NO: 128235 - protein, 9 aa, Homo sapiens
FQVALSRKM

SEQ ID NO: 128236 - protein, 9 aa, Homo sapiens
QVALSRKMA

SEQ ID NO: 128237 - protein, 9 aa, Homo sapiens
VALSRKMAE

SEQ ID NO: 128238 - protein, 9 aa, Homo sapiens
ALSRKMAEL

SEQ ID NO: 128239 - protein, 9 aa, Homo sapiens
LSRKMAELV

SEQ ID NO: 128240 - protein, 9 aa, Homo sapiens
SRKMAELVH

SEQ ID NO: 128241 - protein, 9 aa, Homo sapiens
RKMAELVHF

SEQ ID NO: 128242 - protein, 9 aa, Homo sapiens
KMAELVHFL

SEQ ID NO: 128243 - protein, 9 aa, Homo sapiens
MAELVHFLL

SEQ ID NO: 128244 - protein, 9 aa, Homo sapiens
AELVHFLLL

SEQ ID NO: 128245 - protein, 9 aa, Homo sapiens
ELVHFLLLK

SEQ ID NO: 128246 - protein, 9 aa, Homo sapiens
LVHFLLLKY

SEQ ID NO: 128247 - protein, 9 aa, Homo sapiens
VHFLLLKYR

SEQ ID NO: 128248 - protein, 9 aa, Homo sapiens
HFLLLKYRA

SEQ ID NO: 128249 - protein, 9 aa, Homo sapiens
FLLLKYRAR

SEQ ID NO: 128250 - protein, 9 aa, Homo sapiens
LLLKYRARE

SEQ ID NO: 128251 - protein, 9 aa, Homo sapiens
LLKYRAREP

SEQ ID NO: 128252 - protein, 9 aa, Homo sapiens
LKYRAREPF

SEQ ID NO: 128253 - protein, 9 aa, Homo sapiens
KYRAREPFT

SEQ ID NO: 128254 - protein, 9 aa, Homo sapiens
YRAREPFTK

SEQ ID NO: 128255 - protein, 9 aa, Homo sapiens
RAREPFTKA

SEQ ID NO: 128256 - protein, 9 aa, Homo sapiens
AREPFTKAE

SEQ ID NO: 128257 - protein, 9 aa, Homo sapiens
REPFTKAEM

SEQ ID NO: 128258 - protein, 9 aa, Homo sapiens
EPFTKAEML

SEQ ID NO: 128259 - protein, 9 aa, Homo sapiens
PFTKAEMLG

SEQ ID NO: 128260 - protein, 9 aa, Homo sapiens
FTKAEMLGS

SEQ ID NO: 128261 - protein, 9 aa, Homo sapiens
TKAEMLGSV

SEQ ID NO: 128262 - protein, 9 aa, Homo sapiens
KAEMLGSVI

SEQ ID NO: 128263 - protein, 9 aa, Homo sapiens
AEMLGSVIR

SEQ ID NO: 128264 - protein, 9 aa, Homo sapiens
EMLGSVIRN

SEQ ID NO: 128265 - protein, 9 aa, Homo sapiens
MLGSVIRNF

SEQ ID NO: 128266 - protein, 9 aa, Homo sapiens
LGSVIRNFQ

SEQ ID NO: 128267 - protein, 9 aa, Homo sapiens
GSVIRNFQD

SEQ ID NO: 128268 - protein, 9 aa, Homo sapiens
SVIRNFQDF

SEQ ID NO: 128269 - protein, 9 aa, Homo sapiens
VIRNFQDFF

SEQ ID NO: 128270 - protein, 9 aa, Homo sapiens
IRNFQDFFP

SEQ ID NO: 128271 - protein, 9 aa, Homo sapiens
RNFQDFFPV

SEQ ID NO: 128272 - protein, 9 aa, Homo sapiens
NFQDFFPVI

SEQ ID NO: 128273 - protein, 9 aa, Homo sapiens
FQDFFPVIF

SEQ ID NO: 128274 - protein, 9 aa, Homo sapiens
QDFFPVIFS

SEQ ID NO: 128275 - protein, 9 aa, Homo sapiens
DFFPVIFSK

SEQ ID NO: 128276 - protein, 9 aa, Homo sapiens
FFPVIFSKA

SEQ ID NO: 128277 - protein, 9 aa, Homo sapiens
FPVIFSKAS

SEQ ID NO: 128278 - protein, 9 aa, Homo sapiens
PVIFSKASE

SEQ ID NO: 128279 - protein, 9 aa, Homo sapiens
VIFSKASEY

SEQ ID NO: 128280 - protein, 9 aa, Homo sapiens
IFSKASEYL

SEQ ID NO: 128281 - protein, 9 aa, Homo sapiens
FSKASEYLQ

SEQ ID NO: 128282 - protein, 9 aa, Homo sapiens
SKASEYLQL

SEQ ID NO: 128283 - protein, 9 aa, Homo sapiens
KASEYLQLV

SEQ ID NO: 128284 - protein, 9 aa, Homo sapiens
ASEYLQLVF

SEQ ID NO: 128285 - protein, 9 aa, Homo sapiens
SEYLQLVFG

SEQ ID NO: 128286 - protein, 9 aa, Homo sapiens
EYLQLVFGI

SEQ ID NO: 128287 - protein, 9 aa, Homo sapiens
YLQLVFGIE

SEQ ID NO: 128288 - protein, 9 aa, Homo sapiens
LQLVFGIEV

SEQ ID NO: 128289 - protein, 9 aa, Homo sapiens
QLVFGIEVV

SEQ ID NO: 128290 - protein, 9 aa, Homo sapiens
LVFGIEVVE

SEQ ID NO: 128291 - protein, 9 aa, Homo sapiens
VFGIEVVEV

SEQ ID NO: 128292 - protein, 9 aa, Homo sapiens
FGIEVVEVV

SEQ ID NO: 128293 - protein, 9 aa, Homo sapiens
GIEVVEVVR

SEQ ID NO: 128294 - protein, 9 aa, Homo sapiens
IEVVEVVRI

SEQ ID NO: 128295 - protein, 9 aa, Homo sapiens
EVVEVVRIG

SEQ ID NO: 128296 - protein, 9 aa, Homo sapiens
VVEVVRIGH

SEQ ID NO: 128297 - protein, 9 aa, Homo sapiens
VEVVRIGHL

SEQ ID NO: 128298 - protein, 9 aa, Homo sapiens
EVVRIGHLY

SEQ ID NO: 128299 - protein, 9 aa, Homo sapiens
VVRIGHLYI

SEQ ID NO: 128300 - protein, 9 aa, Homo sapiens
VRIGHLYIL

SEQ ID NO: 128301 - protein, 9 aa, Homo sapiens
RIGHLYILV

SEQ ID NO: 128302 - protein, 9 aa, Homo sapiens
IGHLYILVT

SEQ ID NO: 128303 - protein, 9 aa, Homo sapiens
GHLYILVTC

SEQ ID NO: 128304 - protein, 9 aa, Homo sapiens
HLYILVTCL

SEQ ID NO: 128305 - protein, 9 aa, Homo sapiens
LYILVTCLG

SEQ ID NO: 128306 - protein, 9 aa, Homo sapiens
YILVTCLGL

SEQ ID NO: 128307 - protein, 9 aa, Homo sapiens
ILVTCLGLS

SEQ ID NO: 128308 - protein, 9 aa, Homo sapiens
LVTCLGLSY

SEQ ID NO: 128309 - protein, 9 aa, Homo sapiens
VTCLGLSYD

SEQ ID NO: 128310 - protein, 9 aa, Homo sapiens
TCLGLSYDG

SEQ ID NO: 128311 - protein, 9 aa, Homo sapiens
CLGLSYDGL

SEQ ID NO: 128312 - protein, 9 aa, Homo sapiens
LGLSYDGLL

SEQ ID NO: 128313 - protein, 9 aa, Homo sapiens
GLSYDGLLG

SEQ ID NO: 128314 - protein, 9 aa, Homo sapiens
LSYDGLLGD

SEQ ID NO: 128315 - protein, 9 aa, Homo sapiens
SYDGLLGDN

SEQ ID NO: 128316 - protein, 9 aa, Homo sapiens
YDGLLGDNQ

SEQ ID NO: 128317 - protein, 9 aa, Homo sapiens
DGLLGDNQI

SEQ ID NO: 128318 - protein, 9 aa, Homo sapiens
GLLGDNQIV

SEQ ID NO: 128319 - protein, 9 aa, Homo sapiens
LLGDNQIVP

SEQ ID NO: 128320 - protein, 9 aa, Homo sapiens
LGDNQIVPK

SEQ ID NO: 128321 - protein, 9 aa, Homo sapiens
GDNQIVPKT

SEQ ID NO: 128322 - protein, 9 aa, Homo sapiens
DNQIVPKTG

SEQ ID NO: 128323 - protein, 9 aa, Homo sapiens
NQIVPKTGL

SEQ ID NO: 128324 - protein, 9 aa, Homo sapiens
QIVPKTGLL

SEQ ID NO: 128325 - protein, 9 aa, Homo sapiens
IVPKTGLLI

SEQ ID NO: 128326 - protein, 9 aa, Homo sapiens
VPKTGLLII

SEQ ID NO: 128327 - protein, 9 aa, Homo sapiens
PKTGLLIIV

SEQ ID NO: 128328 - protein, 9 aa, Homo sapiens
KTGLLIIVL

SEQ ID NO: 128329 - protein, 9 aa, Homo sapiens
TGLLIIVLA

SEQ ID NO: 128330 - protein, 9 aa, Homo sapiens
GLLIIVLAI

SEQ ID NO: 128331 - protein, 9 aa, Homo sapiens
LLIIVLAII

SEQ ID NO: 128332 - protein, 9 aa, Homo sapiens
LIIVLAIIA

SEQ ID NO: 128333 - protein, 9 aa, Homo sapiens
IIVLAIIAK

SEQ ID NO: 128334 - protein, 9 aa, Homo sapiens
IVLAIIAKE

SEQ ID NO: 128335 - protein, 9 aa, Homo sapiens
VLAIIAKEG

SEQ ID NO: 128336 - protein, 9 aa, Homo sapiens
LAIIAKEGD

SEQ ID NO: 128337 - protein, 9 aa, Homo sapiens
AIIAKEGDC

SEQ ID NO: 128338 - protein, 9 aa, Homo sapiens
IIAKEGDCA

SEQ ID NO: 128339 - protein, 9 aa, Homo sapiens
IAKEGDCAP

SEQ ID NO: 128340 - protein, 9 aa, Homo sapiens
AKEGDCAPE

SEQ ID NO: 128341 - protein, 9 aa, Homo sapiens
KEGDCAPEE

SEQ ID NO: 128342 - protein, 9 aa, Homo sapiens
EGDCAPEEK

SEQ ID NO: 128343 - protein, 9 aa, Homo sapiens
GDCAPEEKI

SEQ ID NO: 128344 - protein, 9 aa, Homo sapiens
DCAPEEKIW

SEQ ID NO: 128345 - protein, 9 aa, Homo sapiens
CAPEEKIWE

SEQ ID NO: 128346 - protein, 9 aa, Homo sapiens
APEEKIWEE

SEQ ID NO: 128347 - protein, 9 aa, Homo sapiens
PEEKIWEEL

SEQ ID NO: 128348 - protein, 9 aa, Homo sapiens
EEKIWEELS

SEQ ID NO: 128349 - protein, 9 aa, Homo sapiens
EKIWEELSV

SEQ ID NO: 128350 - protein, 9 aa, Homo sapiens
KIWEELSVL

SEQ ID NO: 128351 - protein, 9 aa, Homo sapiens
IWEELSVLE

SEQ ID NO: 128352 - protein, 9 aa, Homo sapiens
WEELSVLEA

SEQ ID NO: 128353 - protein, 9 aa, Homo sapiens
EELSVLEAS

SEQ ID NO: 128354 - protein, 9 aa, Homo sapiens
ELSVLEASD

SEQ ID NO: 128355 - protein, 9 aa, Homo sapiens
LSVLEASDG

SEQ ID NO: 128356 - protein, 9 aa, Homo sapiens
SVLEASDGR

SEQ ID NO: 128357 - protein, 9 aa, Homo sapiens
VLEASDGRE

SEQ ID NO: 128358 - protein, 9 aa, Homo sapiens
LEASDGRED

SEQ ID NO: 128359 - protein, 9 aa, Homo sapiens
EASDGREDS

SEQ ID NO: 128360 - protein, 9 aa, Homo sapiens
ASDGREDSV

SEQ ID NO: 128361 - protein, 9 aa, Homo sapiens
SDGREDSVF

SEQ ID NO: 128362 - protein, 9 aa, Homo sapiens
DGREDSVFA

SEQ ID NO: 128363 - protein, 9 aa, Homo sapiens
GREDSVFAH

SEQ ID NO: 128364 - protein, 9 aa, Homo sapiens
REDSVFAHP

SEQ ID NO: 128365 - protein, 9 aa, Homo sapiens
EDSVFAHPR

SEQ ID NO: 128366 - protein, 9 aa, Homo sapiens
DSVFAHPRK

SEQ ID NO: 128367 - protein, 9 aa, Homo sapiens
SVFAHPRKL

SEQ ID NO: 128368 - protein, 9 aa, Homo sapiens
VFAHPRKLL

SEQ ID NO: 128369 - protein, 9 aa, Homo sapiens
FAHPRKLLT

SEQ ID NO: 128370 - protein, 9 aa, Homo sapiens
AHPRKLLTQ

SEQ ID NO: 128371 - protein, 9 aa, Homo sapiens
HPRKLLTQD

SEQ ID NO: 128372 - protein, 9 aa, Homo sapiens
PRKLLTQDL

SEQ ID NO: 128373 - protein, 9 aa, Homo sapiens
RKLLTQDLV

SEQ ID NO: 128374 - protein, 9 aa, Homo sapiens
KLLTQDLVQ

SEQ ID NO: 128375 - protein, 9 aa, Homo sapiens
LLTQDLVQE

SEQ ID NO: 128376 - protein, 9 aa, Homo sapiens
LTQDLVQEN

SEQ ID NO: 128377 - protein, 9 aa, Homo sapiens
TQDLVQENY

SEQ ID NO: 128378 - protein, 9 aa, Homo sapiens
QDLVQENYL

SEQ ID NO: 128379 - protein, 9 aa, Homo sapiens
DLVQENYLE

SEQ ID NO: 128380 - protein, 9 aa, Homo sapiens
LVQENYLEY

SEQ ID NO: 128381 - protein, 9 aa, Homo sapiens
VQENYLEYR

SEQ ID NO: 128382 - protein, 9 aa, Homo sapiens
QENYLEYRQ

SEQ ID NO: 128383 - protein, 9 aa, Homo sapiens
ENYLEYRQV

SEQ ID NO: 128384 - protein, 9 aa, Homo sapiens
NYLEYRQVP

SEQ ID NO: 128385 - protein, 9 aa, Homo sapiens
YLEYRQVPG

SEQ ID NO: 128386 - protein, 9 aa, Homo sapiens
LEYRQVPGS

SEQ ID NO: 128387 - protein, 9 aa, Homo sapiens
EYRQVPGSD

SEQ ID NO: 128388 - protein, 9 aa, Homo sapiens
YRQVPGSDP

SEQ ID NO: 128389 - protein, 9 aa, Homo sapiens
RQVPGSDPA

SEQ ID NO: 128390 - protein, 9 aa, Homo sapiens
QVPGSDPAC

SEQ ID NO: 128391 - protein, 9 aa, Homo sapiens
VPGSDPACY

SEQ ID NO: 128392 - protein, 9 aa, Homo sapiens
PGSDPACYE

SEQ ID NO: 128393 - protein, 9 aa, Homo sapiens
GSDPACYEF

SEQ ID NO: 128394 - protein, 9 aa, Homo sapiens
SDPACYEFL

SEQ ID NO: 128395 - protein, 9 aa, Homo sapiens
DPACYEFLW

SEQ ID NO: 128396 - protein, 9 aa, Homo sapiens
PACYEFLWG

SEQ ID NO: 128397 - protein, 9 aa, Homo sapiens
ACYEFLWGP

SEQ ID NO: 128398 - protein, 9 aa, Homo sapiens
CYEFLWGPR

SEQ ID NO: 128399 - protein, 9 aa, Homo sapiens
YEFLWGPRA

SEQ ID NO: 128400 - protein, 9 aa, Homo sapiens
EFLWGPRAL

SEQ ID NO: 128401 - protein, 9 aa, Homo sapiens
FLWGPRALV

SEQ ID NO: 128402 - protein, 9 aa, Homo sapiens
LWGPRALVE

SEQ ID NO: 128403 - protein, 9 aa, Homo sapiens
WGPRALVET

SEQ ID NO: 128404 - protein, 9 aa, Homo sapiens
GPRALVETS

SEQ ID NO: 128405 - protein, 9 aa, Homo sapiens
PRALVETSY

SEQ ID NO: 128406 - protein, 9 aa, Homo sapiens
RALVETSYV

SEQ ID NO: 128407 - protein, 9 aa, Homo sapiens
ALVETSYVK

SEQ ID NO: 128408 - protein, 9 aa, Homo sapiens
LVETSYVKV

SEQ ID NO: 128409 - protein, 9 aa, Homo sapiens
VETSYVKVL

SEQ ID NO: 128410 - protein, 9 aa, Homo sapiens
ETSYVKVLH

SEQ ID NO: 128411 - protein, 9 aa, Homo sapiens
TSYVKVLHH

SEQ ID NO: 128412 - protein, 9 aa, Homo sapiens
SYVKVLHHL

SEQ ID NO: 128413 - protein, 9 aa, Homo sapiens
YVKVLHHLL

SEQ ID NO: 128414 - protein, 9 aa, Homo sapiens
VKVLHHLLK

SEQ ID NO: 128415 - protein, 9 aa, Homo sapiens
KVLHHLLKI

SEQ ID NO: 128416 - protein, 9 aa, Homo sapiens
VLHHLLKIS

SEQ ID NO: 128417 - protein, 9 aa, Homo sapiens
LHHLLKISG

SEQ ID NO: 128418 - protein, 9 aa, Homo sapiens
HHLLKISGG

SEQ ID NO: 128419 - protein, 9 aa, Homo sapiens
HLLKISGGP

SEQ ID NO: 128420 - protein, 9 aa, Homo sapiens
LLKISGGPH

SEQ ID NO: 128421 - protein, 9 aa, Homo sapiens
LKISGGPHI

SEQ ID NO: 128422 - protein, 9 aa, Homo sapiens
KISGGPHIS

SEQ ID NO: 128423 - protein, 9 aa, Homo sapiens
ISGGPHISY

SEQ ID NO: 128424 - protein, 9 aa, Homo sapiens
SGGPHISYP

SEQ ID NO: 128425 - protein, 9 aa, Homo sapiens
GGPHISYPP

SEQ ID NO: 128426 - protein, 9 aa, Homo sapiens
GPHISYPPL

SEQ ID NO: 128427 - protein, 9 aa, Homo sapiens
PHISYPPLH

SEQ ID NO: 128428 - protein, 9 aa, Homo sapiens
HISYPPLHE

SEQ ID NO: 128429 - protein, 9 aa, Homo sapiens
ISYPPLHEW

SEQ ID NO: 128430 - protein, 9 aa, Homo sapiens
SYPPLHEWA

SEQ ID NO: 128431 - protein, 9 aa, Homo sapiens
YPPLHEWAF

SEQ ID NO: 128432 - protein, 9 aa, Homo sapiens
PPLHEWAFR

SEQ ID NO: 128433 - protein, 9 aa, Homo sapiens
PLHEWAFRE

SEQ ID NO: 128434 - protein, 9 aa, Homo sapiens
LHEWAFREG

SEQ ID NO: 128435 - protein, 9 aa, Homo sapiens
HEWAFREGE

SEQ ID NO: 128436 - protein, 9 aa, Homo sapiens
EWAFREGEE

SEQ ID NO: 128437 - protein, 9 aa, Homo sapiens
MRLPLLLVF

SEQ ID NO: 128438 - protein, 9 aa, Homo sapiens
RLPLLLVFA

SEQ ID NO: 128439 - protein, 9 aa, Homo sapiens
LPLLLVFAS

SEQ ID NO: 128440 - protein, 9 aa, Homo sapiens
PLLLVFASV

SEQ ID NO: 128441 - protein, 9 aa, Homo sapiens
LLLVFASVI

SEQ ID NO: 128442 - protein, 9 aa, Homo sapiens
LLVFASVIP

SEQ ID NO: 128443 - protein, 9 aa, Homo sapiens
LVFASVIPG

SEQ ID NO: 128444 - protein, 9 aa, Homo sapiens
VFASVIPGA

SEQ ID NO: 128445 - protein, 9 aa, Homo sapiens
FASVIPGAV

SEQ ID NO: 128446 - protein, 9 aa, Homo sapiens
ASVIPGAVL

SEQ ID NO: 128447 - protein, 9 aa, Homo sapiens
SVIPGAVLL

SEQ ID NO: 128448 - protein, 9 aa, Homo sapiens
VIPGAVLLL

SEQ ID NO: 128449 - protein, 9 aa, Homo sapiens
IPGAVLLLD

SEQ ID NO: 128450 - protein, 9 aa, Homo sapiens
PGAVLLLDT

SEQ ID NO: 128451 - protein, 9 aa, Homo sapiens
GAVLLLDTR

SEQ ID NO: 128452 - protein, 9 aa, Homo sapiens
AVLLLDTRQ

SEQ ID NO: 128453 - protein, 9 aa, Homo sapiens
VLLLDTRQF

SEQ ID NO: 128454 - protein, 9 aa, Homo sapiens
LLLDTRQFL

SEQ ID NO: 128455 - protein, 9 aa, Homo sapiens
LLDTRQFLI

SEQ ID NO: 128456 - protein, 9 aa, Homo sapiens
LDTRQFLIY

SEQ ID NO: 128457 - protein, 9 aa, Homo sapiens
DTRQFLIYN

SEQ ID NO: 128458 - protein, 9 aa, Homo sapiens
TRQFLIYNE

SEQ ID NO: 128459 - protein, 9 aa, Homo sapiens
RQFLIYNED

SEQ ID NO: 128460 - protein, 9 aa, Homo sapiens
QFLIYNEDH

SEQ ID NO: 128461 - protein, 9 aa, Homo sapiens
FLIYNEDHK

SEQ ID NO: 128462 - protein, 9 aa, Homo sapiens
LIYNEDHKR

SEQ ID NO: 128463 - protein, 9 aa, Homo sapiens
IYNEDHKRC

SEQ ID NO: 128464 - protein, 9 aa, Homo sapiens
YNEDHKRCV

SEQ ID NO: 128465 - protein, 9 aa, Homo sapiens
NEDHKRCVD

SEQ ID NO: 128466 - protein, 9 aa, Homo sapiens
EDHKRCVDA

SEQ ID NO: 128467 - protein, 9 aa, Homo sapiens
DHKRCVDAV

SEQ ID NO: 128468 - protein, 9 aa, Homo sapiens
HKRCVDAVS

SEQ ID NO: 128469 - protein, 9 aa, Homo sapiens
KRCVDAVSP

SEQ ID NO: 128470 - protein, 9 aa, Homo sapiens
RCVDAVSPS

SEQ ID NO: 128471 - protein, 9 aa, Homo sapiens
CVDAVSPSA

SEQ ID NO: 128472 - protein, 9 aa, Homo sapiens
VDAVSPSAV

SEQ ID NO: 128473 - protein, 9 aa, Homo sapiens
DAVSPSAVQ

SEQ ID NO: 128474 - protein, 9 aa, Homo sapiens
AVSPSAVQT

SEQ ID NO: 128475 - protein, 9 aa, Homo sapiens
VSPSAVQTA

SEQ ID NO: 128476 - protein, 9 aa, Homo sapiens
SPSAVQTAA

SEQ ID NO: 128477 - protein, 9 aa, Homo sapiens
PSAVQTAAC

SEQ ID NO: 128478 - protein, 9 aa, Homo sapiens
SAVQTAACN

SEQ ID NO: 128479 - protein, 9 aa, Homo sapiens
AVQTAACNQ

SEQ ID NO: 128480 - protein, 9 aa, Homo sapiens
VQTAACNQD

SEQ ID NO: 128481 - protein, 9 aa, Homo sapiens
QTAACNQDA

SEQ ID NO: 128482 - protein, 9 aa, Homo sapiens
TAACNQDAE

SEQ ID NO: 128483 - protein, 9 aa, Homo sapiens
AACNQDAES

SEQ ID NO: 128484 - protein, 9 aa, Homo sapiens
ACNQDAESQ

SEQ ID NO: 128485 - protein, 9 aa, Homo sapiens
CNQDAESQK

SEQ ID NO: 128486 - protein, 9 aa, Homo sapiens
NQDAESQKF

SEQ ID NO: 128487 - protein, 9 aa, Homo sapiens
QDAESQKFR

SEQ ID NO: 128488 - protein, 9 aa, Homo sapiens
DAESQKFRW

SEQ ID NO: 128489 - protein, 9 aa, Homo sapiens
AESQKFRWV

SEQ ID NO: 128490 - protein, 9 aa, Homo sapiens
ESQKFRWVS

SEQ ID NO: 128491 - protein, 9 aa, Homo sapiens
SQKFRWVSE

SEQ ID NO: 128492 - protein, 9 aa, Homo sapiens
QKFRWVSES

SEQ ID NO: 128493 - protein, 9 aa, Homo sapiens
KFRWVSESQ

SEQ ID NO: 128494 - protein, 9 aa, Homo sapiens
FRWVSESQI

SEQ ID NO: 128495 - protein, 9 aa, Homo sapiens
RWVSESQIM

SEQ ID NO: 128496 - protein, 9 aa, Homo sapiens
WVSESQIMS

SEQ ID NO: 128497 - protein, 9 aa, Homo sapiens
VSESQIMSV

SEQ ID NO: 128498 - protein, 9 aa, Homo sapiens
SESQIMSVA

SEQ ID NO: 128499 - protein, 9 aa, Homo sapiens
ESQIMSVAF

SEQ ID NO: 128500 - protein, 9 aa, Homo sapiens
SQIMSVAFK

SEQ ID NO: 128501 - protein, 9 aa, Homo sapiens
QIMSVAFKL

SEQ ID NO: 128502 - protein, 9 aa, Homo sapiens
IMSVAFKLC

SEQ ID NO: 128503 - protein, 9 aa, Homo sapiens
MSVAFKLCL

SEQ ID NO: 128504 - protein, 9 aa, Homo sapiens
SVAFKLCLG

SEQ ID NO: 128505 - protein, 9 aa, Homo sapiens
VAFKLCLGV

SEQ ID NO: 128506 - protein, 9 aa, Homo sapiens
AFKLCLGVP

SEQ ID NO: 128507 - protein, 9 aa, Homo sapiens
FKLCLGVPS

SEQ ID NO: 128508 - protein, 9 aa, Homo sapiens
KLCLGVPSK

SEQ ID NO: 128509 - protein, 9 aa, Homo sapiens
LCLGVPSKT

SEQ ID NO: 128510 - protein, 9 aa, Homo sapiens
CLGVPSKTD

SEQ ID NO: 128511 - protein, 9 aa, Homo sapiens
LGVPSKTDW

SEQ ID NO: 128512 - protein, 9 aa, Homo sapiens
GVPSKTDWV

SEQ ID NO: 128513 - protein, 9 aa, Homo sapiens
VPSKTDWVA

SEQ ID NO: 128514 - protein, 9 aa, Homo sapiens
PSKTDWVAI

SEQ ID NO: 128515 - protein, 9 aa, Homo sapiens
SKTDWVAIT

SEQ ID NO: 128516 - protein, 9 aa, Homo sapiens
KTDWVAITL

SEQ ID NO: 128517 - protein, 9 aa, Homo sapiens
TDWVAITLY

SEQ ID NO: 128518 - protein, 9 aa, Homo sapiens
DWVAITLYA

SEQ ID NO: 128519 - protein, 9 aa, Homo sapiens
WVAITLYAC

SEQ ID NO: 128520 - protein, 9 aa, Homo sapiens
VAITLYACD

SEQ ID NO: 128521 - protein, 9 aa, Homo sapiens
AITLYACDS

SEQ ID NO: 128522 - protein, 9 aa, Homo sapiens
ITLYACDSK

SEQ ID NO: 128523 - protein, 9 aa, Homo sapiens
TLYACDSKS

SEQ ID NO: 128524 - protein, 9 aa, Homo sapiens
LYACDSKSE

SEQ ID NO: 128525 - protein, 9 aa, Homo sapiens
YACDSKSEF

SEQ ID NO: 128526 - protein, 9 aa, Homo sapiens
ACDSKSEFQ

SEQ ID NO: 128527 - protein, 9 aa, Homo sapiens
CDSKSEFQK

SEQ ID NO: 128528 - protein, 9 aa, Homo sapiens
DSKSEFQKW

SEQ ID NO: 128529 - protein, 9 aa, Homo sapiens
SKSEFQKWE

SEQ ID NO: 128530 - protein, 9 aa, Homo sapiens
KSEFQKWEC

SEQ ID NO: 128531 - protein, 9 aa, Homo sapiens
SEFQKWECK

SEQ ID NO: 128532 - protein, 9 aa, Homo sapiens
EFQKWECKN

SEQ ID NO: 128533 - protein, 9 aa, Homo sapiens
FQKWECKND

SEQ ID NO: 128534 - protein, 9 aa, Homo sapiens
QKWECKNDT

SEQ ID NO: 128535 - protein, 9 aa, Homo sapiens
KWECKNDTL

SEQ ID NO: 128536 - protein, 9 aa, Homo sapiens
WECKNDTLL

SEQ ID NO: 128537 - protein, 9 aa, Homo sapiens
ECKNDTLLG

SEQ ID NO: 128538 - protein, 9 aa, Homo sapiens
CKNDTLLGI

SEQ ID NO: 128539 - protein, 9 aa, Homo sapiens
KNDTLLGIK

SEQ ID NO: 128540 - protein, 9 aa, Homo sapiens
NDTLLGIKG

SEQ ID NO: 128541 - protein, 9 aa, Homo sapiens
DTLLGIKGE

SEQ ID NO: 128542 - protein, 9 aa, Homo sapiens
TLLGIKGED

SEQ ID NO: 128543 - protein, 9 aa, Homo sapiens
LLGIKGEDL

SEQ ID NO: 128544 - protein, 9 aa, Homo sapiens
LGIKGEDLF

SEQ ID NO: 128545 - protein, 9 aa, Homo sapiens
GIKGEDLFF

SEQ ID NO: 128546 - protein, 9 aa, Homo sapiens
IKGEDLFFN

SEQ ID NO: 128547 - protein, 9 aa, Homo sapiens
KGEDLFFNY

SEQ ID NO: 128548 - protein, 9 aa, Homo sapiens
GEDLFFNYG

SEQ ID NO: 128549 - protein, 9 aa, Homo sapiens
EDLFFNYGN

SEQ ID NO: 128550 - protein, 9 aa, Homo sapiens
DLFFNYGNR

SEQ ID NO: 128551 - protein, 9 aa, Homo sapiens
LFFNYGNRQ

SEQ ID NO: 128552 - protein, 9 aa, Homo sapiens
FFNYGNRQE

SEQ ID NO: 128553 - protein, 9 aa, Homo sapiens
FNYGNRQEK

SEQ ID NO: 128554 - protein, 9 aa, Homo sapiens
NYGNRQEKN

SEQ ID NO: 128555 - protein, 9 aa, Homo sapiens
YGNRQEKNI

SEQ ID NO: 128556 - protein, 9 aa, Homo sapiens
GNRQEKNIM

SEQ ID NO: 128557 - protein, 9 aa, Homo sapiens
NRQEKNIML

SEQ ID NO: 128558 - protein, 9 aa, Homo sapiens
RQEKNIMLY

SEQ ID NO: 128559 - protein, 9 aa, Homo sapiens
QEKNIMLYK

SEQ ID NO: 128560 - protein, 9 aa, Homo sapiens
EKNIMLYKG

SEQ ID NO: 128561 - protein, 9 aa, Homo sapiens
KNIMLYKGS

SEQ ID NO: 128562 - protein, 9 aa, Homo sapiens
NIMLYKGSG

SEQ ID NO: 128563 - protein, 9 aa, Homo sapiens
IMLYKGSGL

SEQ ID NO: 128564 - protein, 9 aa, Homo sapiens
MLYKGSGLW

SEQ ID NO: 128565 - protein, 9 aa, Homo sapiens
LYKGSGLWS

SEQ ID NO: 128566 - protein, 9 aa, Homo sapiens
YKGSGLWSR

SEQ ID NO: 128567 - protein, 9 aa, Homo sapiens
KGSGLWSRW

SEQ ID NO: 128568 - protein, 9 aa, Homo sapiens
GSGLWSRWK

SEQ ID NO: 128569 - protein, 9 aa, Homo sapiens
SGLWSRWKI

SEQ ID NO: 128570 - protein, 9 aa, Homo sapiens
GLWSRWKIY

SEQ ID NO: 128571 - protein, 9 aa, Homo sapiens
LWSRWKIYG

SEQ ID NO: 128572 - protein, 9 aa, Homo sapiens
WSRWKIYGT

SEQ ID NO: 128573 - protein, 9 aa, Homo sapiens
SRWKIYGTT

SEQ ID NO: 128574 - protein, 9 aa, Homo sapiens
RWKIYGTTD

SEQ ID NO: 128575 - protein, 9 aa, Homo sapiens
WKIYGTTDN

SEQ ID NO: 128576 - protein, 9 aa, Homo sapiens
KIYGTTDNL

SEQ ID NO: 128577 - protein, 9 aa, Homo sapiens
IYGTTDNLC

SEQ ID NO: 128578 - protein, 9 aa, Homo sapiens
YGTTDNLCS

SEQ ID NO: 128579 - protein, 9 aa, Homo sapiens
GTTDNLCSR

SEQ ID NO: 128580 - protein, 9 aa, Homo sapiens
TTDNLCSRG

SEQ ID NO: 128581 - protein, 9 aa, Homo sapiens
TDNLCSRGY

SEQ ID NO: 128582 - protein, 9 aa, Homo sapiens
DNLCSRGYE

SEQ ID NO: 128583 - protein, 9 aa, Homo sapiens
NLCSRGYEA

SEQ ID NO: 128584 - protein, 9 aa, Homo sapiens
LCSRGYEAM

SEQ ID NO: 128585 - protein, 9 aa, Homo sapiens
CSRGYEAMY

SEQ ID NO: 128586 - protein, 9 aa, Homo sapiens
SRGYEAMYT

SEQ ID NO: 128587 - protein, 9 aa, Homo sapiens
RGYEAMYTL

SEQ ID NO: 128588 - protein, 9 aa, Homo sapiens
GYEAMYTLL

SEQ ID NO: 128589 - protein, 9 aa, Homo sapiens
YEAMYTLLG

SEQ ID NO: 128590 - protein, 9 aa, Homo sapiens
EAMYTLLGN

SEQ ID NO: 128591 - protein, 9 aa, Homo sapiens
AMYTLLGNA

SEQ ID NO: 128592 - protein, 9 aa, Homo sapiens
MYTLLGNAN

SEQ ID NO: 128593 - protein, 9 aa, Homo sapiens
YTLLGNANG

SEQ ID NO: 128594 - protein, 9 aa, Homo sapiens
TLLGNANGA

SEQ ID NO: 128595 - protein, 9 aa, Homo sapiens
LLGNANGAT

SEQ ID NO: 128596 - protein, 9 aa, Homo sapiens
LGNANGATC

SEQ ID NO: 128597 - protein, 9 aa, Homo sapiens
GNANGATCA

SEQ ID NO: 128598 - protein, 9 aa, Homo sapiens
NANGATCAF

SEQ ID NO: 128599 - protein, 9 aa, Homo sapiens
ANGATCAFP

SEQ ID NO: 128600 - protein, 9 aa, Homo sapiens
NGATCAFPF

SEQ ID NO: 128601 - protein, 9 aa, Homo sapiens
GATCAFPFK

SEQ ID NO: 128602 - protein, 9 aa, Homo sapiens
ATCAFPFKF

SEQ ID NO: 128603 - protein, 9 aa, Homo sapiens
TCAFPFKFE

SEQ ID NO: 128604 - protein, 9 aa, Homo sapiens
CAFPFKFEN

SEQ ID NO: 128605 - protein, 9 aa, Homo sapiens
AFPFKFENK

SEQ ID NO: 128606 - protein, 9 aa, Homo sapiens
FPFKFENKW

SEQ ID NO: 128607 - protein, 9 aa, Homo sapiens
PFKFENKWY

SEQ ID NO: 128608 - protein, 9 aa, Homo sapiens
FKFENKWYA

SEQ ID NO: 128609 - protein, 9 aa, Homo sapiens
KFENKWYAD

SEQ ID NO: 128610 - protein, 9 aa, Homo sapiens
FENKWYADC

SEQ ID NO: 128611 - protein, 9 aa, Homo sapiens
ENKWYADCT

SEQ ID NO: 128612 - protein, 9 aa, Homo sapiens
NKWYADCTS

SEQ ID NO: 128613 - protein, 9 aa, Homo sapiens
KWYADCTSA

SEQ ID NO: 128614 - protein, 9 aa, Homo sapiens
WYADCTSAG

SEQ ID NO: 128615 - protein, 9 aa, Homo sapiens
YADCTSAGR

SEQ ID NO: 128616 - protein, 9 aa, Homo sapiens
ADCTSAGRS

SEQ ID NO: 128617 - protein, 9 aa, Homo sapiens
DCTSAGRSD

SEQ ID NO: 128618 - protein, 9 aa, Homo sapiens
CTSAGRSDG

SEQ ID NO: 128619 - protein, 9 aa, Homo sapiens
TSAGRSDGW

SEQ ID NO: 128620 - protein, 9 aa, Homo sapiens
SAGRSDGWL

SEQ ID NO: 128621 - protein, 9 aa, Homo sapiens
AGRSDGWLW

SEQ ID NO: 128622 - protein, 9 aa, Homo sapiens
GRSDGWLWC

SEQ ID NO: 128623 - protein, 9 aa, Homo sapiens
RSDGWLWCG

SEQ ID NO: 128624 - protein, 9 aa, Homo sapiens
SDGWLWCGT

SEQ ID NO: 128625 - protein, 9 aa, Homo sapiens
DGWLWCGTT

SEQ ID NO: 128626 - protein, 9 aa, Homo sapiens
GWLWCGTTT

SEQ ID NO: 128627 - protein, 9 aa, Homo sapiens
WLWCGTTTD

SEQ ID NO: 128628 - protein, 9 aa, Homo sapiens
LWCGTTTDY

SEQ ID NO: 128629 - protein, 9 aa, Homo sapiens
WCGTTTDYD

SEQ ID NO: 128630 - protein, 9 aa, Homo sapiens
CGTTTDYDT

SEQ ID NO: 128631 - protein, 9 aa, Homo sapiens
GTTTDYDTD

SEQ ID NO: 128632 - protein, 9 aa, Homo sapiens
TTTDYDTDK

SEQ ID NO: 128633 - protein, 9 aa, Homo sapiens
TTDYDTDKL

SEQ ID NO: 128634 - protein, 9 aa, Homo sapiens
TDYDTDKLF

SEQ ID NO: 128635 - protein, 9 aa, Homo sapiens
DYDTDKLFG

SEQ ID NO: 128636 - protein, 9 aa, Homo sapiens
YDTDKLFGY

SEQ ID NO: 128637 - protein, 9 aa, Homo sapiens
DTDKLFGYC

SEQ ID NO: 128638 - protein, 9 aa, Homo sapiens
TDKLFGYCP

SEQ ID NO: 128639 - protein, 9 aa, Homo sapiens
DKLFGYCPL

SEQ ID NO: 128640 - protein, 9 aa, Homo sapiens
KLFGYCPLK

SEQ ID NO: 128641 - protein, 9 aa, Homo sapiens
LFGYCPLKF

SEQ ID NO: 128642 - protein, 9 aa, Homo sapiens
FGYCPLKFE

SEQ ID NO: 128643 - protein, 9 aa, Homo sapiens
GYCPLKFEG

SEQ ID NO: 128644 - protein, 9 aa, Homo sapiens
YCPLKFEGS

SEQ ID NO: 128645 - protein, 9 aa, Homo sapiens
CPLKFEGSE

SEQ ID NO: 128646 - protein, 9 aa, Homo sapiens
PLKFEGSES

SEQ ID NO: 128647 - protein, 9 aa, Homo sapiens
LKFEGSESL

SEQ ID NO: 128648 - protein, 9 aa, Homo sapiens
KFEGSESLW

SEQ ID NO: 128649 - protein, 9 aa, Homo sapiens
FEGSESLWN

SEQ ID NO: 128650 - protein, 9 aa, Homo sapiens
EGSESLWNK

SEQ ID NO: 128651 - protein, 9 aa, Homo sapiens
GSESLWNKD

SEQ ID NO: 128652 - protein, 9 aa, Homo sapiens
SESLWNKDP

SEQ ID NO: 128653 - protein, 9 aa, Homo sapiens
ESLWNKDPL

SEQ ID NO: 128654 - protein, 9 aa, Homo sapiens
SLWNKDPLT

SEQ ID NO: 128655 - protein, 9 aa, Homo sapiens
LWNKDPLTS

SEQ ID NO: 128656 - protein, 9 aa, Homo sapiens
WNKDPLTSV

SEQ ID NO: 128657 - protein, 9 aa, Homo sapiens
NKDPLTSVS

SEQ ID NO: 128658 - protein, 9 aa, Homo sapiens
KDPLTSVSY

SEQ ID NO: 128659 - protein, 9 aa, Homo sapiens
DPLTSVSYQ

SEQ ID NO: 128660 - protein, 9 aa, Homo sapiens
PLTSVSYQI

SEQ ID NO: 128661 - protein, 9 aa, Homo sapiens
LTSVSYQIN

SEQ ID NO: 128662 - protein, 9 aa, Homo sapiens
TSVSYQINS

SEQ ID NO: 128663 - protein, 9 aa, Homo sapiens
SVSYQINSK

SEQ ID NO: 128664 - protein, 9 aa, Homo sapiens
VSYQINSKS

SEQ ID NO: 128665 - protein, 9 aa, Homo sapiens
SYQINSKSA

SEQ ID NO: 128666 - protein, 9 aa, Homo sapiens
YQINSKSAL

SEQ ID NO: 128667 - protein, 9 aa, Homo sapiens
QINSKSALS

SEQ ID NO: 128668 - protein, 9 aa, Homo sapiens
INSKSALSW

SEQ ID NO: 128669 - protein, 9 aa, Homo sapiens
NSKSALSWH

SEQ ID NO: 128670 - protein, 9 aa, Homo sapiens
SKSALSWHQ

SEQ ID NO: 128671 - protein, 9 aa, Homo sapiens
KSALSWHQA

SEQ ID NO: 128672 - protein, 9 aa, Homo sapiens
SALSWHQAR

SEQ ID NO: 128673 - protein, 9 aa, Homo sapiens
ALSWHQARK

SEQ ID NO: 128674 - protein, 9 aa, Homo sapiens
LSWHQARKS

SEQ ID NO: 128675 - protein, 9 aa, Homo sapiens
SWHQARKSC

SEQ ID NO: 128676 - protein, 9 aa, Homo sapiens
WHQARKSCQ

SEQ ID NO: 128677 - protein, 9 aa, Homo sapiens
HQARKSCQQ

SEQ ID NO: 128678 - protein, 9 aa, Homo sapiens
QARKSCQQQ

SEQ ID NO: 128679 - protein, 9 aa, Homo sapiens
ARKSCQQQN

SEQ ID NO: 128680 - protein, 9 aa, Homo sapiens
RKSCQQQNA

SEQ ID NO: 128681 - protein, 9 aa, Homo sapiens
KSCQQQNAE

SEQ ID NO: 128682 - protein, 9 aa, Homo sapiens
SCQQQNAEL

SEQ ID NO: 128683 - protein, 9 aa, Homo sapiens
CQQQNAELL

SEQ ID NO: 128684 - protein, 9 aa, Homo sapiens
QQQNAELLS

SEQ ID NO: 128685 - protein, 9 aa, Homo sapiens
QQNAELLSI

SEQ ID NO: 128686 - protein, 9 aa, Homo sapiens
QNAELLSIT

SEQ ID NO: 128687 - protein, 9 aa, Homo sapiens
NAELLSITE

SEQ ID NO: 128688 - protein, 9 aa, Homo sapiens
AELLSITEI

SEQ ID NO: 128689 - protein, 9 aa, Homo sapiens
ELLSITEIH

SEQ ID NO: 128690 - protein, 9 aa, Homo sapiens
LLSITEIHE

SEQ ID NO: 128691 - protein, 9 aa, Homo sapiens
LSITEIHEQ

SEQ ID NO: 128692 - protein, 9 aa, Homo sapiens
SITEIHEQT

SEQ ID NO: 128693 - protein, 9 aa, Homo sapiens
ITEIHEQTY

SEQ ID NO: 128694 - protein, 9 aa, Homo sapiens
TEIHEQTYL

SEQ ID NO: 128695 - protein, 9 aa, Homo sapiens
EIHEQTYLT

SEQ ID NO: 128696 - protein, 9 aa, Homo sapiens
IHEQTYLTG

SEQ ID NO: 128697 - protein, 9 aa, Homo sapiens
HEQTYLTGL

SEQ ID NO: 128698 - protein, 9 aa, Homo sapiens
EQTYLTGLT

SEQ ID NO: 128699 - protein, 9 aa, Homo sapiens
QTYLTGLTS

SEQ ID NO: 128700 - protein, 9 aa, Homo sapiens
TYLTGLTSS

SEQ ID NO: 128701 - protein, 9 aa, Homo sapiens
YLTGLTSSL

SEQ ID NO: 128702 - protein, 9 aa, Homo sapiens
LTGLTSSLT

SEQ ID NO: 128703 - protein, 9 aa, Homo sapiens
TGLTSSLTS

SEQ ID NO: 128704 - protein, 9 aa, Homo sapiens
GLTSSLTSG

SEQ ID NO: 128705 - protein, 9 aa, Homo sapiens
LTSSLTSGL

SEQ ID NO: 128706 - protein, 9 aa, Homo sapiens
TSSLTSGLW

SEQ ID NO: 128707 - protein, 9 aa, Homo sapiens
SSLTSGLWI

SEQ ID NO: 128708 - protein, 9 aa, Homo sapiens
SLTSGLWIG

SEQ ID NO: 128709 - protein, 9 aa, Homo sapiens
LTSGLWIGL

SEQ ID NO: 128710 - protein, 9 aa, Homo sapiens
TSGLWIGLN

SEQ ID NO: 128711 - protein, 9 aa, Homo sapiens
SGLWIGLNS

SEQ ID NO: 128712 - protein, 9 aa, Homo sapiens
GLWIGLNSL

SEQ ID NO: 128713 - protein, 9 aa, Homo sapiens
LWIGLNSLS

SEQ ID NO: 128714 - protein, 9 aa, Homo sapiens
WIGLNSLSF

SEQ ID NO: 128715 - protein, 9 aa, Homo sapiens
IGLNSLSFN

SEQ ID NO: 128716 - protein, 9 aa, Homo sapiens
GLNSLSFNS

SEQ ID NO: 128717 - protein, 9 aa, Homo sapiens
LNSLSFNSG

SEQ ID NO: 128718 - protein, 9 aa, Homo sapiens
NSLSFNSGW

SEQ ID NO: 128719 - protein, 9 aa, Homo sapiens
SLSFNSGWQ

SEQ ID NO: 128720 - protein, 9 aa, Homo sapiens
LSFNSGWQW

SEQ ID NO: 128721 - protein, 9 aa, Homo sapiens
SFNSGWQWS

SEQ ID NO: 128722 - protein, 9 aa, Homo sapiens
FNSGWQWSD

SEQ ID NO: 128723 - protein, 9 aa, Homo sapiens
NSGWQWSDR

SEQ ID NO: 128724 - protein, 9 aa, Homo sapiens
SGWQWSDRS

SEQ ID NO: 128725 - protein, 9 aa, Homo sapiens
GWQWSDRSP

SEQ ID NO: 128726 - protein, 9 aa, Homo sapiens
WQWSDRSPF

SEQ ID NO: 128727 - protein, 9 aa, Homo sapiens
QWSDRSPFR

SEQ ID NO: 128728 - protein, 9 aa, Homo sapiens
WSDRSPFRY

SEQ ID NO: 128729 - protein, 9 aa, Homo sapiens
SDRSPFRYL

SEQ ID NO: 128730 - protein, 9 aa, Homo sapiens
DRSPFRYLN

SEQ ID NO: 128731 - protein, 9 aa, Homo sapiens
RSPFRYLNW

SEQ ID NO: 128732 - protein, 9 aa, Homo sapiens
SPFRYLNWL

SEQ ID NO: 128733 - protein, 9 aa, Homo sapiens
PFRYLNWLP

SEQ ID NO: 128734 - protein, 9 aa, Homo sapiens
FRYLNWLPG

SEQ ID NO: 128735 - protein, 9 aa, Homo sapiens
RYLNWLPGS

SEQ ID NO: 128736 - protein, 9 aa, Homo sapiens
YLNWLPGSP

SEQ ID NO: 128737 - protein, 9 aa, Homo sapiens
LNWLPGSPS

SEQ ID NO: 128738 - protein, 9 aa, Homo sapiens
NWLPGSPSA

SEQ ID NO: 128739 - protein, 9 aa, Homo sapiens
WLPGSPSAE

SEQ ID NO: 128740 - protein, 9 aa, Homo sapiens
LPGSPSAEP

SEQ ID NO: 128741 - protein, 9 aa, Homo sapiens
PGSPSAEPG

SEQ ID NO: 128742 - protein, 9 aa, Homo sapiens
GSPSAEPGK

SEQ ID NO: 128743 - protein, 9 aa, Homo sapiens
SPSAEPGKS

SEQ ID NO: 128744 - protein, 9 aa, Homo sapiens
PSAEPGKSC

SEQ ID NO: 128745 - protein, 9 aa, Homo sapiens
SAEPGKSCV

SEQ ID NO: 128746 - protein, 9 aa, Homo sapiens
AEPGKSCVS

SEQ ID NO: 128747 - protein, 9 aa, Homo sapiens
EPGKSCVSL

SEQ ID NO: 128748 - protein, 9 aa, Homo sapiens
PGKSCVSLN

SEQ ID NO: 128749 - protein, 9 aa, Homo sapiens
GKSCVSLNP

SEQ ID NO: 128750 - protein, 9 aa, Homo sapiens
KSCVSLNPG

SEQ ID NO: 128751 - protein, 9 aa, Homo sapiens
SCVSLNPGK

SEQ ID NO: 128752 - protein, 9 aa, Homo sapiens
CVSLNPGKN

SEQ ID NO: 128753 - protein, 9 aa, Homo sapiens
VSLNPGKNA

SEQ ID NO: 128754 - protein, 9 aa, Homo sapiens
SLNPGKNAK

SEQ ID NO: 128755 - protein, 9 aa, Homo sapiens
LNPGKNAKW

SEQ ID NO: 128756 - protein, 9 aa, Homo sapiens
NPGKNAKWE

SEQ ID NO: 128757 - protein, 9 aa, Homo sapiens
PGKNAKWEN

SEQ ID NO: 128758 - protein, 9 aa, Homo sapiens
GKNAKWENL

SEQ ID NO: 128759 - protein, 9 aa, Homo sapiens
KNAKWENLE

SEQ ID NO: 128760 - protein, 9 aa, Homo sapiens
NAKWENLEC

SEQ ID NO: 128761 - protein, 9 aa, Homo sapiens
AKWENLECV

SEQ ID NO: 128762 - protein, 9 aa, Homo sapiens
KWENLECVQ

SEQ ID NO: 128763 - protein, 9 aa, Homo sapiens
WENLECVQK

SEQ ID NO: 128764 - protein, 9 aa, Homo sapiens
ENLECVQKL

SEQ ID NO: 128765 - protein, 9 aa, Homo sapiens
NLECVQKLG

SEQ ID NO: 128766 - protein, 9 aa, Homo sapiens
LECVQKLGY

SEQ ID NO: 128767 - protein, 9 aa, Homo sapiens
ECVQKLGYI

SEQ ID NO: 128768 - protein, 9 aa, Homo sapiens
CVQKLGYIC

SEQ ID NO: 128769 - protein, 9 aa, Homo sapiens
VQKLGYICK

SEQ ID NO: 128770 - protein, 9 aa, Homo sapiens
QKLGYICKK

SEQ ID NO: 128771 - protein, 9 aa, Homo sapiens
KLGYICKKG

SEQ ID NO: 128772 - protein, 9 aa, Homo sapiens
LGYICKKGN

SEQ ID NO: 128773 - protein, 9 aa, Homo sapiens
GYICKKGNT

SEQ ID NO: 128774 - protein, 9 aa, Homo sapiens
YICKKGNTT

SEQ ID NO: 128775 - protein, 9 aa, Homo sapiens
ICKKGNTTL

SEQ ID NO: 128776 - protein, 9 aa, Homo sapiens
CKKGNTTLN

SEQ ID NO: 128777 - protein, 9 aa, Homo sapiens
KKGNTTLNS

SEQ ID NO: 128778 - protein, 9 aa, Homo sapiens
KGNTTLNSF

SEQ ID NO: 128779 - protein, 9 aa, Homo sapiens
GNTTLNSFV

SEQ ID NO: 128780 - protein, 9 aa, Homo sapiens
NTTLNSFVI

SEQ ID NO: 128781 - protein, 9 aa, Homo sapiens
TTLNSFVIP

SEQ ID NO: 128782 - protein, 9 aa, Homo sapiens
TLNSFVIPS

SEQ ID NO: 128783 - protein, 9 aa, Homo sapiens
LNSFVIPSE

SEQ ID NO: 128784 - protein, 9 aa, Homo sapiens
NSFVIPSES

SEQ ID NO: 128785 - protein, 9 aa, Homo sapiens
SFVIPSESD

SEQ ID NO: 128786 - protein, 9 aa, Homo sapiens
FVIPSESDV

SEQ ID NO: 128787 - protein, 9 aa, Homo sapiens
VIPSESDVP

SEQ ID NO: 128788 - protein, 9 aa, Homo sapiens
IPSESDVPT

SEQ ID NO: 128789 - protein, 9 aa, Homo sapiens
PSESDVPTH

SEQ ID NO: 128790 - protein, 9 aa, Homo sapiens
SESDVPTHC

SEQ ID NO: 128791 - protein, 9 aa, Homo sapiens
ESDVPTHCP

SEQ ID NO: 128792 - protein, 9 aa, Homo sapiens
SDVPTHCPS

SEQ ID NO: 128793 - protein, 9 aa, Homo sapiens
DVPTHCPSQ

SEQ ID NO: 128794 - protein, 9 aa, Homo sapiens
VPTHCPSQW

SEQ ID NO: 128795 - protein, 9 aa, Homo sapiens
PTHCPSQWW

SEQ ID NO: 128796 - protein, 9 aa, Homo sapiens
THCPSQWWP

SEQ ID NO: 128797 - protein, 9 aa, Homo sapiens
HCPSQWWPY

SEQ ID NO: 128798 - protein, 9 aa, Homo sapiens
CPSQWWPYA

SEQ ID NO: 128799 - protein, 9 aa, Homo sapiens
PSQWWPYAG

SEQ ID NO: 128800 - protein, 9 aa, Homo sapiens
SQWWPYAGH

SEQ ID NO: 128801 - protein, 9 aa, Homo sapiens
QWWPYAGHC

SEQ ID NO: 128802 - protein, 9 aa, Homo sapiens
WWPYAGHCY

SEQ ID NO: 128803 - protein, 9 aa, Homo sapiens
WPYAGHCYK

SEQ ID NO: 128804 - protein, 9 aa, Homo sapiens
PYAGHCYKI

SEQ ID NO: 128805 - protein, 9 aa, Homo sapiens
YAGHCYKIH

SEQ ID NO: 128806 - protein, 9 aa, Homo sapiens
AGHCYKIHR

SEQ ID NO: 128807 - protein, 9 aa, Homo sapiens
GHCYKIHRD

SEQ ID NO: 128808 - protein, 9 aa, Homo sapiens
HCYKIHRDE

SEQ ID NO: 128809 - protein, 9 aa, Homo sapiens
CYKIHRDEK

SEQ ID NO: 128810 - protein, 9 aa, Homo sapiens
YKIHRDEKK

SEQ ID NO: 128811 - protein, 9 aa, Homo sapiens
KIHRDEKKI

SEQ ID NO: 128812 - protein, 9 aa, Homo sapiens
IHRDEKKIQ

SEQ ID NO: 128813 - protein, 9 aa, Homo sapiens
HRDEKKIQR

SEQ ID NO: 128814 - protein, 9 aa, Homo sapiens
RDEKKIQRD

SEQ ID NO: 128815 - protein, 9 aa, Homo sapiens
DEKKIQRDA

SEQ ID NO: 128816 - protein, 9 aa, Homo sapiens
EKKIQRDAL

SEQ ID NO: 128817 - protein, 9 aa, Homo sapiens
KKIQRDALT

SEQ ID NO: 128818 - protein, 9 aa, Homo sapiens
KIQRDALTT

SEQ ID NO: 128819 - protein, 9 aa, Homo sapiens
IQRDALTTC

SEQ ID NO: 128820 - protein, 9 aa, Homo sapiens
QRDALTTCR

SEQ ID NO: 128821 - protein, 9 aa, Homo sapiens
RDALTTCRK

SEQ ID NO: 128822 - protein, 9 aa, Homo sapiens
DALTTCRKE

SEQ ID NO: 128823 - protein, 9 aa, Homo sapiens
ALTTCRKEG

SEQ ID NO: 128824 - protein, 9 aa, Homo sapiens
LTTCRKEGG

SEQ ID NO: 128825 - protein, 9 aa, Homo sapiens
TTCRKEGGD

SEQ ID NO: 128826 - protein, 9 aa, Homo sapiens
TCRKEGGDL

SEQ ID NO: 128827 - protein, 9 aa, Homo sapiens
CRKEGGDLA

SEQ ID NO: 128828 - protein, 9 aa, Homo sapiens
RKEGGDLAS

SEQ ID NO: 128829 - protein, 9 aa, Homo sapiens
KEGGDLASI

SEQ ID NO: 128830 - protein, 9 aa, Homo sapiens
EGGDLASIH

SEQ ID NO: 128831 - protein, 9 aa, Homo sapiens
GGDLASIHT

SEQ ID NO: 128832 - protein, 9 aa, Homo sapiens
GDLASIHTI

SEQ ID NO: 128833 - protein, 9 aa, Homo sapiens
DLASIHTIE

SEQ ID NO: 128834 - protein, 9 aa, Homo sapiens
LASIHTIEE

SEQ ID NO: 128835 - protein, 9 aa, Homo sapiens
ASIHTIEEF

SEQ ID NO: 128836 - protein, 9 aa, Homo sapiens
SIHTIEEFD

SEQ ID NO: 128837 - protein, 9 aa, Homo sapiens
IHTIEEFDF

SEQ ID NO: 128838 - protein, 9 aa, Homo sapiens
HTIEEFDFI

SEQ ID NO: 128839 - protein, 9 aa, Homo sapiens
TIEEFDFII

SEQ ID NO: 128840 - protein, 9 aa, Homo sapiens
IEEFDFIIS

SEQ ID NO: 128841 - protein, 9 aa, Homo sapiens
EEFDFIISQ

SEQ ID NO: 128842 - protein, 9 aa, Homo sapiens
EFDFIISQL

SEQ ID NO: 128843 - protein, 9 aa, Homo sapiens
FDFIISQLG

SEQ ID NO: 128844 - protein, 9 aa, Homo sapiens
DFIISQLGY

SEQ ID NO: 128845 - protein, 9 aa, Homo sapiens
FIISQLGYE

SEQ ID NO: 128846 - protein, 9 aa, Homo sapiens
IISQLGYEP

SEQ ID NO: 128847 - protein, 9 aa, Homo sapiens
ISQLGYEPN

SEQ ID NO: 128848 - protein, 9 aa, Homo sapiens
SQLGYEPND

SEQ ID NO: 128849 - protein, 9 aa, Homo sapiens
QLGYEPNDE

SEQ ID NO: 128850 - protein, 9 aa, Homo sapiens
LGYEPNDEL

SEQ ID NO: 128851 - protein, 9 aa, Homo sapiens
GYEPNDELW

SEQ ID NO: 128852 - protein, 9 aa, Homo sapiens
YEPNDELWI

SEQ ID NO: 128853 - protein, 9 aa, Homo sapiens
EPNDELWIG

SEQ ID NO: 128854 - protein, 9 aa, Homo sapiens
PNDELWIGL

SEQ ID NO: 128855 - protein, 9 aa, Homo sapiens
NDELWIGLN

SEQ ID NO: 128856 - protein, 9 aa, Homo sapiens
DELWIGLND

SEQ ID NO: 128857 - protein, 9 aa, Homo sapiens
ELWIGLNDI

SEQ ID NO: 128858 - protein, 9 aa, Homo sapiens
LWIGLNDIK

SEQ ID NO: 128859 - protein, 9 aa, Homo sapiens
WIGLNDIKI

SEQ ID NO: 128860 - protein, 9 aa, Homo sapiens
IGLNDIKIQ

SEQ ID NO: 128861 - protein, 9 aa, Homo sapiens
GLNDIKIQM

SEQ ID NO: 128862 - protein, 9 aa, Homo sapiens
LNDIKIQMY

SEQ ID NO: 128863 - protein, 9 aa, Homo sapiens
NDIKIQMYF

SEQ ID NO: 128864 - protein, 9 aa, Homo sapiens
DIKIQMYFE

SEQ ID NO: 128865 - protein, 9 aa, Homo sapiens
IKIQMYFEW

SEQ ID NO: 128866 - protein, 9 aa, Homo sapiens
KIQMYFEWS

SEQ ID NO: 128867 - protein, 9 aa, Homo sapiens
IQMYFEWSD

SEQ ID NO: 128868 - protein, 9 aa, Homo sapiens
QMYFEWSDG

SEQ ID NO: 128869 - protein, 9 aa, Homo sapiens
MYFEWSDGT

SEQ ID NO: 128870 - protein, 9 aa, Homo sapiens
YFEWSDGTP

SEQ ID NO: 128871 - protein, 9 aa, Homo sapiens
FEWSDGTPV

SEQ ID NO: 128872 - protein, 9 aa, Homo sapiens
EWSDGTPVT

SEQ ID NO: 128873 - protein, 9 aa, Homo sapiens
WSDGTPVTF

SEQ ID NO: 128874 - protein, 9 aa, Homo sapiens
SDGTPVTFT

SEQ ID NO: 128875 - protein, 9 aa, Homo sapiens
DGTPVTFTK

SEQ ID NO: 128876 - protein, 9 aa, Homo sapiens
GTPVTFTKW

SEQ ID NO: 128877 - protein, 9 aa, Homo sapiens
TPVTFTKWL

SEQ ID NO: 128878 - protein, 9 aa, Homo sapiens
PVTFTKWLR

SEQ ID NO: 128879 - protein, 9 aa, Homo sapiens
VTFTKWLRG

SEQ ID NO: 128880 - protein, 9 aa, Homo sapiens
TFTKWLRGE

SEQ ID NO: 128881 - protein, 9 aa, Homo sapiens
FTKWLRGEP

SEQ ID NO: 128882 - protein, 9 aa, Homo sapiens
TKWLRGEPS

SEQ ID NO: 128883 - protein, 9 aa, Homo sapiens
KWLRGEPSH

SEQ ID NO: 128884 - protein, 9 aa, Homo sapiens
WLRGEPSHE

SEQ ID NO: 128885 - protein, 9 aa, Homo sapiens
LRGEPSHEN

SEQ ID NO: 128886 - protein, 9 aa, Homo sapiens
RGEPSHENN

SEQ ID NO: 128887 - protein, 9 aa, Homo sapiens
GEPSHENNR

SEQ ID NO: 128888 - protein, 9 aa, Homo sapiens
EPSHENNRQ

SEQ ID NO: 128889 - protein, 9 aa, Homo sapiens
PSHENNRQE

SEQ ID NO: 128890 - protein, 9 aa, Homo sapiens
SHENNRQED

SEQ ID NO: 128891 - protein, 9 aa, Homo sapiens
HENNRQEDC

SEQ ID NO: 128892 - protein, 9 aa, Homo sapiens
ENNRQEDCV

SEQ ID NO: 128893 - protein, 9 aa, Homo sapiens
NNRQEDCVV

SEQ ID NO: 128894 - protein, 9 aa, Homo sapiens
NRQEDCVVM

SEQ ID NO: 128895 - protein, 9 aa, Homo sapiens
RQEDCVVMK

SEQ ID NO: 128896 - protein, 9 aa, Homo sapiens
QEDCVVMKG

SEQ ID NO: 128897 - protein, 9 aa, Homo sapiens
EDCVVMKGK

SEQ ID NO: 128898 - protein, 9 aa, Homo sapiens
DCVVMKGKD

SEQ ID NO: 128899 - protein, 9 aa, Homo sapiens
CVVMKGKDG

SEQ ID NO: 128900 - protein, 9 aa, Homo sapiens
VVMKGKDGY

SEQ ID NO: 128901 - protein, 9 aa, Homo sapiens
VMKGKDGYW

SEQ ID NO: 128902 - protein, 9 aa, Homo sapiens
MKGKDGYWA

SEQ ID NO: 128903 - protein, 9 aa, Homo sapiens
KGKDGYWAD

SEQ ID NO: 128904 - protein, 9 aa, Homo sapiens
GKDGYWADR

SEQ ID NO: 128905 - protein, 9 aa, Homo sapiens
KDGYWADRG

SEQ ID NO: 128906 - protein, 9 aa, Homo sapiens
DGYWADRGC

SEQ ID NO: 128907 - protein, 9 aa, Homo sapiens
GYWADRGCE

SEQ ID NO: 128908 - protein, 9 aa, Homo sapiens
YWADRGCEW

SEQ ID NO: 128909 - protein, 9 aa, Homo sapiens
WADRGCEWP

SEQ ID NO: 128910 - protein, 9 aa, Homo sapiens
ADRGCEWPL

SEQ ID NO: 128911 - protein, 9 aa, Homo sapiens
DRGCEWPLG

SEQ ID NO: 128912 - protein, 9 aa, Homo sapiens
RGCEWPLGY

SEQ ID NO: 128913 - protein, 9 aa, Homo sapiens
GCEWPLGYI

SEQ ID NO: 128914 - protein, 9 aa, Homo sapiens
CEWPLGYIC

SEQ ID NO: 128915 - protein, 9 aa, Homo sapiens
EWPLGYICK

SEQ ID NO: 128916 - protein, 9 aa, Homo sapiens
WPLGYICKM

SEQ ID NO: 128917 - protein, 9 aa, Homo sapiens
PLGYICKMK

SEQ ID NO: 128918 - protein, 9 aa, Homo sapiens
LGYICKMKS

SEQ ID NO: 128919 - protein, 9 aa, Homo sapiens
GYICKMKSR

SEQ ID NO: 128920 - protein, 9 aa, Homo sapiens
YICKMKSRS

SEQ ID NO: 128921 - protein, 9 aa, Homo sapiens
ICKMKSRSQ

SEQ ID NO: 128922 - protein, 9 aa, Homo sapiens
CKMKSRSQG

SEQ ID NO: 128923 - protein, 9 aa, Homo sapiens
KMKSRSQGP

SEQ ID NO: 128924 - protein, 9 aa, Homo sapiens
MKSRSQGPE

SEQ ID NO: 128925 - protein, 9 aa, Homo sapiens
KSRSQGPEI

SEQ ID NO: 128926 - protein, 9 aa, Homo sapiens
SRSQGPEIV

SEQ ID NO: 128927 - protein, 9 aa, Homo sapiens
RSQGPEIVE

SEQ ID NO: 128928 - protein, 9 aa, Homo sapiens
SQGPEIVEV

SEQ ID NO: 128929 - protein, 9 aa, Homo sapiens
QGPEIVEVE

SEQ ID NO: 128930 - protein, 9 aa, Homo sapiens
GPEIVEVEK

SEQ ID NO: 128931 - protein, 9 aa, Homo sapiens
PEIVEVEKG

SEQ ID NO: 128932 - protein, 9 aa, Homo sapiens
EIVEVEKGC

SEQ ID NO: 128933 - protein, 9 aa, Homo sapiens
IVEVEKGCR

SEQ ID NO: 128934 - protein, 9 aa, Homo sapiens
VEVEKGCRK

SEQ ID NO: 128935 - protein, 9 aa, Homo sapiens
EVEKGCRKG

SEQ ID NO: 128936 - protein, 9 aa, Homo sapiens
VEKGCRKGW

SEQ ID NO: 128937 - protein, 9 aa, Homo sapiens
EKGCRKGWK

SEQ ID NO: 128938 - protein, 9 aa, Homo sapiens
KGCRKGWKK

SEQ ID NO: 128939 - protein, 9 aa, Homo sapiens
GCRKGWKKH

SEQ ID NO: 128940 - protein, 9 aa, Homo sapiens
CRKGWKKHH

SEQ ID NO: 128941 - protein, 9 aa, Homo sapiens
RKGWKKHHF

SEQ ID NO: 128942 - protein, 9 aa, Homo sapiens
KGWKKHHFY

SEQ ID NO: 128943 - protein, 9 aa, Homo sapiens
GWKKHHFYC

SEQ ID NO: 128944 - protein, 9 aa, Homo sapiens
WKKHHFYCY

SEQ ID NO: 128945 - protein, 9 aa, Homo sapiens
KKHHFYCYM

SEQ ID NO: 128946 - protein, 9 aa, Homo sapiens
KHHFYCYMI

SEQ ID NO: 128947 - protein, 9 aa, Homo sapiens
HHFYCYMIG

SEQ ID NO: 128948 - protein, 9 aa, Homo sapiens
HFYCYMIGH

SEQ ID NO: 128949 - protein, 9 aa, Homo sapiens
FYCYMIGHT

SEQ ID NO: 128950 - protein, 9 aa, Homo sapiens
YCYMIGHTL

SEQ ID NO: 128951 - protein, 9 aa, Homo sapiens
CYMIGHTLS

SEQ ID NO: 128952 - protein, 9 aa, Homo sapiens
YMIGHTLST

SEQ ID NO: 128953 - protein, 9 aa, Homo sapiens
MIGHTLSTF

SEQ ID NO: 128954 - protein, 9 aa, Homo sapiens
IGHTLSTFA

SEQ ID NO: 128955 - protein, 9 aa, Homo sapiens
GHTLSTFAE

SEQ ID NO: 128956 - protein, 9 aa, Homo sapiens
HTLSTFAEA

SEQ ID NO: 128957 - protein, 9 aa, Homo sapiens
TLSTFAEAN

SEQ ID NO: 128958 - protein, 9 aa, Homo sapiens
LSTFAEANQ

SEQ ID NO: 128959 - protein, 9 aa, Homo sapiens
STFAEANQT

SEQ ID NO: 128960 - protein, 9 aa, Homo sapiens
TFAEANQTC

SEQ ID NO: 128961 - protein, 9 aa, Homo sapiens
FAEANQTCN

SEQ ID NO: 128962 - protein, 9 aa, Homo sapiens
AEANQTCNN

SEQ ID NO: 128963 - protein, 9 aa, Homo sapiens
EANQTCNNE

SEQ ID NO: 128964 - protein, 9 aa, Homo sapiens
ANQTCNNEN

SEQ ID NO: 128965 - protein, 9 aa, Homo sapiens
NQTCNNENA

SEQ ID NO: 128966 - protein, 9 aa, Homo sapiens
QTCNNENAY

SEQ ID NO: 128967 - protein, 9 aa, Homo sapiens
TCNNENAYL

SEQ ID NO: 128968 - protein, 9 aa, Homo sapiens
CNNENAYLT

SEQ ID NO: 128969 - protein, 9 aa, Homo sapiens
NNENAYLTT

SEQ ID NO: 128970 - protein, 9 aa, Homo sapiens
NENAYLTTI

SEQ ID NO: 128971 - protein, 9 aa, Homo sapiens
ENAYLTTIE

SEQ ID NO: 128972 - protein, 9 aa, Homo sapiens
NAYLTTIED

SEQ ID NO: 128973 - protein, 9 aa, Homo sapiens
AYLTTIEDR

SEQ ID NO: 128974 - protein, 9 aa, Homo sapiens
YLTTIEDRY

SEQ ID NO: 128975 - protein, 9 aa, Homo sapiens
LTTIEDRYE

SEQ ID NO: 128976 - protein, 9 aa, Homo sapiens
TTIEDRYEQ

SEQ ID NO: 128977 - protein, 9 aa, Homo sapiens
TIEDRYEQA

SEQ ID NO: 128978 - protein, 9 aa, Homo sapiens
IEDRYEQAF

SEQ ID NO: 128979 - protein, 9 aa, Homo sapiens
EDRYEQAFL

SEQ ID NO: 128980 - protein, 9 aa, Homo sapiens
DRYEQAFLT

SEQ ID NO: 128981 - protein, 9 aa, Homo sapiens
RYEQAFLTS

SEQ ID NO: 128982 - protein, 9 aa, Homo sapiens
YEQAFLTSF

SEQ ID NO: 128983 - protein, 9 aa, Homo sapiens
EQAFLTSFV

SEQ ID NO: 128984 - protein, 9 aa, Homo sapiens
QAFLTSFVG

SEQ ID NO: 128985 - protein, 9 aa, Homo sapiens
AFLTSFVGL

SEQ ID NO: 128986 - protein, 9 aa, Homo sapiens
FLTSFVGLR

SEQ ID NO: 128987 - protein, 9 aa, Homo sapiens
LTSFVGLRP

SEQ ID NO: 128988 - protein, 9 aa, Homo sapiens
TSFVGLRPE

SEQ ID NO: 128989 - protein, 9 aa, Homo sapiens
SFVGLRPEK

SEQ ID NO: 128990 - protein, 9 aa, Homo sapiens
FVGLRPEKY

SEQ ID NO: 128991 - protein, 9 aa, Homo sapiens
VGLRPEKYF

SEQ ID NO: 128992 - protein, 9 aa, Homo sapiens
GLRPEKYFW

SEQ ID NO: 128993 - protein, 9 aa, Homo sapiens
LRPEKYFWT

SEQ ID NO: 128994 - protein, 9 aa, Homo sapiens
RPEKYFWTG

SEQ ID NO: 128995 - protein, 9 aa, Homo sapiens
PEKYFWTGL

SEQ ID NO: 128996 - protein, 9 aa, Homo sapiens
EKYFWTGLS

SEQ ID NO: 128997 - protein, 9 aa, Homo sapiens
KYFWTGLSD

SEQ ID NO: 128998 - protein, 9 aa, Homo sapiens
YFWTGLSDI

SEQ ID NO: 128999 - protein, 9 aa, Homo sapiens
FWTGLSDIQ

SEQ ID NO: 129000 - protein, 9 aa, Homo sapiens
WTGLSDIQT

SEQ ID NO: 129001 - protein, 9 aa, Homo sapiens
TGLSDIQTK

SEQ ID NO: 129002 - protein, 9 aa, Homo sapiens
GLSDIQTKG

SEQ ID NO: 129003 - protein, 9 aa, Homo sapiens
LSDIQTKGT

SEQ ID NO: 129004 - protein, 9 aa, Homo sapiens
SDIQTKGTF

SEQ ID NO: 129005 - protein, 9 aa, Homo sapiens
DIQTKGTFQ

SEQ ID NO: 129006 - protein, 9 aa, Homo sapiens
IQTKGTFQW

SEQ ID NO: 129007 - protein, 9 aa, Homo sapiens
QTKGTFQWT

SEQ ID NO: 129008 - protein, 9 aa, Homo sapiens
TKGTFQWTI

SEQ ID NO: 129009 - protein, 9 aa, Homo sapiens
KGTFQWTIE

SEQ ID NO: 129010 - protein, 9 aa, Homo sapiens
GTFQWTIEE

SEQ ID NO: 129011 - protein, 9 aa, Homo sapiens
TFQWTIEEE

SEQ ID NO: 129012 - protein, 9 aa, Homo sapiens
FQWTIEEEV

SEQ ID NO: 129013 - protein, 9 aa, Homo sapiens
QWTIEEEVR

SEQ ID NO: 129014 - protein, 9 aa, Homo sapiens
WTIEEEVRF

SEQ ID NO: 129015 - protein, 9 aa, Homo sapiens
TIEEEVRFT

SEQ ID NO: 129016 - protein, 9 aa, Homo sapiens
IEEEVRFTH

SEQ ID NO: 129017 - protein, 9 aa, Homo sapiens
EEEVRFTHW

SEQ ID NO: 129018 - protein, 9 aa, Homo sapiens
EEVRFTHWN

SEQ ID NO: 129019 - protein, 9 aa, Homo sapiens
EVRFTHWNS

SEQ ID NO: 129020 - protein, 9 aa, Homo sapiens
VRFTHWNSD

SEQ ID NO: 129021 - protein, 9 aa, Homo sapiens
RFTHWNSDM

SEQ ID NO: 129022 - protein, 9 aa, Homo sapiens
FTHWNSDMP

SEQ ID NO: 129023 - protein, 9 aa, Homo sapiens
THWNSDMPG

SEQ ID NO: 129024 - protein, 9 aa, Homo sapiens
HWNSDMPGR

SEQ ID NO: 129025 - protein, 9 aa, Homo sapiens
WNSDMPGRK

SEQ ID NO: 129026 - protein, 9 aa, Homo sapiens
NSDMPGRKP

SEQ ID NO: 129027 - protein, 9 aa, Homo sapiens
SDMPGRKPG

SEQ ID NO: 129028 - protein, 9 aa, Homo sapiens
DMPGRKPGC

SEQ ID NO: 129029 - protein, 9 aa, Homo sapiens
MPGRKPGCV

SEQ ID NO: 129030 - protein, 9 aa, Homo sapiens
PGRKPGCVA

SEQ ID NO: 129031 - protein, 9 aa, Homo sapiens
GRKPGCVAM

SEQ ID NO: 129032 - protein, 9 aa, Homo sapiens
RKPGCVAMR

SEQ ID NO: 129033 - protein, 9 aa, Homo sapiens
KPGCVAMRT

SEQ ID NO: 129034 - protein, 9 aa, Homo sapiens
PGCVAMRTG

SEQ ID NO: 129035 - protein, 9 aa, Homo sapiens
GCVAMRTGI

SEQ ID NO: 129036 - protein, 9 aa, Homo sapiens
CVAMRTGIA

SEQ ID NO: 129037 - protein, 9 aa, Homo sapiens
VAMRTGIAG

SEQ ID NO: 129038 - protein, 9 aa, Homo sapiens
AMRTGIAGG

SEQ ID NO: 129039 - protein, 9 aa, Homo sapiens
MRTGIAGGL

SEQ ID NO: 129040 - protein, 9 aa, Homo sapiens
RTGIAGGLW

SEQ ID NO: 129041 - protein, 9 aa, Homo sapiens
TGIAGGLWD

SEQ ID NO: 129042 - protein, 9 aa, Homo sapiens
GIAGGLWDV

SEQ ID NO: 129043 - protein, 9 aa, Homo sapiens
IAGGLWDVL

SEQ ID NO: 129044 - protein, 9 aa, Homo sapiens
AGGLWDVLK

SEQ ID NO: 129045 - protein, 9 aa, Homo sapiens
GGLWDVLKC

SEQ ID NO: 129046 - protein, 9 aa, Homo sapiens
GLWDVLKCD

SEQ ID NO: 129047 - protein, 9 aa, Homo sapiens
LWDVLKCDE

SEQ ID NO: 129048 - protein, 9 aa, Homo sapiens
WDVLKCDEK

SEQ ID NO: 129049 - protein, 9 aa, Homo sapiens
DVLKCDEKA

SEQ ID NO: 129050 - protein, 9 aa, Homo sapiens
VLKCDEKAK

SEQ ID NO: 129051 - protein, 9 aa, Homo sapiens
LKCDEKAKF

SEQ ID NO: 129052 - protein, 9 aa, Homo sapiens
KCDEKAKFV

SEQ ID NO: 129053 - protein, 9 aa, Homo sapiens
CDEKAKFVC

SEQ ID NO: 129054 - protein, 9 aa, Homo sapiens
DEKAKFVCK

SEQ ID NO: 129055 - protein, 9 aa, Homo sapiens
EKAKFVCKH

SEQ ID NO: 129056 - protein, 9 aa, Homo sapiens
KAKFVCKHW

SEQ ID NO: 129057 - protein, 9 aa, Homo sapiens
AKFVCKHWA

SEQ ID NO: 129058 - protein, 9 aa, Homo sapiens
KFVCKHWAE

SEQ ID NO: 129059 - protein, 9 aa, Homo sapiens
FVCKHWAEG

SEQ ID NO: 129060 - protein, 9 aa, Homo sapiens
VCKHWAEGV

SEQ ID NO: 129061 - protein, 9 aa, Homo sapiens
CKHWAEGVT

SEQ ID NO: 129062 - protein, 9 aa, Homo sapiens
KHWAEGVTH

SEQ ID NO: 129063 - protein, 9 aa, Homo sapiens
HWAEGVTHP

SEQ ID NO: 129064 - protein, 9 aa, Homo sapiens
WAEGVTHPP

SEQ ID NO: 129065 - protein, 9 aa, Homo sapiens
AEGVTHPPK

SEQ ID NO: 129066 - protein, 9 aa, Homo sapiens
EGVTHPPKP

SEQ ID NO: 129067 - protein, 9 aa, Homo sapiens
GVTHPPKPT

SEQ ID NO: 129068 - protein, 9 aa, Homo sapiens
VTHPPKPTT

SEQ ID NO: 129069 - protein, 9 aa, Homo sapiens
THPPKPTTT

SEQ ID NO: 129070 - protein, 9 aa, Homo sapiens
HPPKPTTTP

SEQ ID NO: 129071 - protein, 9 aa, Homo sapiens
PPKPTTTPE

SEQ ID NO: 129072 - protein, 9 aa, Homo sapiens
PKPTTTPEP

SEQ ID NO: 129073 - protein, 9 aa, Homo sapiens
KPTTTPEPK

SEQ ID NO: 129074 - protein, 9 aa, Homo sapiens
PTTTPEPKC

SEQ ID NO: 129075 - protein, 9 aa, Homo sapiens
TTTPEPKCP

SEQ ID NO: 129076 - protein, 9 aa, Homo sapiens
TTPEPKCPE

SEQ ID NO: 129077 - protein, 9 aa, Homo sapiens
TPEPKCPED

SEQ ID NO: 129078 - protein, 9 aa, Homo sapiens
PEPKCPEDW

SEQ ID NO: 129079 - protein, 9 aa, Homo sapiens
EPKCPEDWG

SEQ ID NO: 129080 - protein, 9 aa, Homo sapiens
PKCPEDWGA

SEQ ID NO: 129081 - protein, 9 aa, Homo sapiens
KCPEDWGAS

SEQ ID NO: 129082 - protein, 9 aa, Homo sapiens
CPEDWGASS

SEQ ID NO: 129083 - protein, 9 aa, Homo sapiens
PEDWGASSR

SEQ ID NO: 129084 - protein, 9 aa, Homo sapiens
EDWGASSRT

SEQ ID NO: 129085 - protein, 9 aa, Homo sapiens
DWGASSRTS

SEQ ID NO: 129086 - protein, 9 aa, Homo sapiens
WGASSRTSL

SEQ ID NO: 129087 - protein, 9 aa, Homo sapiens
GASSRTSLC

SEQ ID NO: 129088 - protein, 9 aa, Homo sapiens
ASSRTSLCF

SEQ ID NO: 129089 - protein, 9 aa, Homo sapiens
SSRTSLCFK

SEQ ID NO: 129090 - protein, 9 aa, Homo sapiens
SRTSLCFKL

SEQ ID NO: 129091 - protein, 9 aa, Homo sapiens
RTSLCFKLY

SEQ ID NO: 129092 - protein, 9 aa, Homo sapiens
TSLCFKLYA

SEQ ID NO: 129093 - protein, 9 aa, Homo sapiens
SLCFKLYAK

SEQ ID NO: 129094 - protein, 9 aa, Homo sapiens
LCFKLYAKG

SEQ ID NO: 129095 - protein, 9 aa, Homo sapiens
CFKLYAKGK

SEQ ID NO: 129096 - protein, 9 aa, Homo sapiens
FKLYAKGKI

SEQ ID NO: 129097 - protein, 9 aa, Homo sapiens
KLYAKGKIE

SEQ ID NO: 129098 - protein, 9 aa, Homo sapiens
LYAKGKIEK

SEQ ID NO: 129099 - protein, 9 aa, Homo sapiens
YAKGKIEKK

SEQ ID NO: 129100 - protein, 9 aa, Homo sapiens
AKGKIEKKT

SEQ ID NO: 129101 - protein, 9 aa, Homo sapiens
KGKIEKKTW

SEQ ID NO: 129102 - protein, 9 aa, Homo sapiens
GKIEKKTWF

SEQ ID NO: 129103 - protein, 9 aa, Homo sapiens
KIEKKTWFE

SEQ ID NO: 129104 - protein, 9 aa, Homo sapiens
IEKKTWFES

SEQ ID NO: 129105 - protein, 9 aa, Homo sapiens
EKKTWFESR

SEQ ID NO: 129106 - protein, 9 aa, Homo sapiens
KKTWFESRD

SEQ ID NO: 129107 - protein, 9 aa, Homo sapiens
KTWFESRDF

SEQ ID NO: 129108 - protein, 9 aa, Homo sapiens
TWFESRDFC

SEQ ID NO: 129109 - protein, 9 aa, Homo sapiens
WFESRDFCR

SEQ ID NO: 129110 - protein, 9 aa, Homo sapiens
FESRDFCRA

SEQ ID NO: 129111 - protein, 9 aa, Homo sapiens
ESRDFCRAL

SEQ ID NO: 129112 - protein, 9 aa, Homo sapiens
SRDFCRALG

SEQ ID NO: 129113 - protein, 9 aa, Homo sapiens
RDFCRALGG

SEQ ID NO: 129114 - protein, 9 aa, Homo sapiens
DFCRALGGD

SEQ ID NO: 129115 - protein, 9 aa, Homo sapiens
FCRALGGDL

SEQ ID NO: 129116 - protein, 9 aa, Homo sapiens
CRALGGDLA

SEQ ID NO: 129117 - protein, 9 aa, Homo sapiens
RALGGDLAS

SEQ ID NO: 129118 - protein, 9 aa, Homo sapiens
ALGGDLASI

SEQ ID NO: 129119 - protein, 9 aa, Homo sapiens
LGGDLASIN

SEQ ID NO: 129120 - protein, 9 aa, Homo sapiens
GGDLASINN

SEQ ID NO: 129121 - protein, 9 aa, Homo sapiens
GDLASINNK

SEQ ID NO: 129122 - protein, 9 aa, Homo sapiens
DLASINNKE

SEQ ID NO: 129123 - protein, 9 aa, Homo sapiens
LASINNKEE

SEQ ID NO: 129124 - protein, 9 aa, Homo sapiens
ASINNKEEQ

SEQ ID NO: 129125 - protein, 9 aa, Homo sapiens
SINNKEEQQ

SEQ ID NO: 129126 - protein, 9 aa, Homo sapiens
INNKEEQQT

SEQ ID NO: 129127 - protein, 9 aa, Homo sapiens
NNKEEQQTI

SEQ ID NO: 129128 - protein, 9 aa, Homo sapiens
NKEEQQTIW

SEQ ID NO: 129129 - protein, 9 aa, Homo sapiens
KEEQQTIWR

SEQ ID NO: 129130 - protein, 9 aa, Homo sapiens
EEQQTIWRL

SEQ ID NO: 129131 - protein, 9 aa, Homo sapiens
EQQTIWRLI

SEQ ID NO: 129132 - protein, 9 aa, Homo sapiens
QQTIWRLIT

SEQ ID NO: 129133 - protein, 9 aa, Homo sapiens
QTIWRLITA

SEQ ID NO: 129134 - protein, 9 aa, Homo sapiens
TIWRLITAS

SEQ ID NO: 129135 - protein, 9 aa, Homo sapiens
IWRLITASG

SEQ ID NO: 129136 - protein, 9 aa, Homo sapiens
WRLITASGS

SEQ ID NO: 129137 - protein, 9 aa, Homo sapiens
RLITASGSY

SEQ ID NO: 129138 - protein, 9 aa, Homo sapiens
LITASGSYH

SEQ ID NO: 129139 - protein, 9 aa, Homo sapiens
ITASGSYHK

SEQ ID NO: 129140 - protein, 9 aa, Homo sapiens
TASGSYHKL

SEQ ID NO: 129141 - protein, 9 aa, Homo sapiens
ASGSYHKLF

SEQ ID NO: 129142 - protein, 9 aa, Homo sapiens
SGSYHKLFW

SEQ ID NO: 129143 - protein, 9 aa, Homo sapiens
GSYHKLFWL

SEQ ID NO: 129144 - protein, 9 aa, Homo sapiens
SYHKLFWLG

SEQ ID NO: 129145 - protein, 9 aa, Homo sapiens
YHKLFWLGL

SEQ ID NO: 129146 - protein, 9 aa, Homo sapiens
HKLFWLGLT

SEQ ID NO: 129147 - protein, 9 aa, Homo sapiens
KLFWLGLTY

SEQ ID NO: 129148 - protein, 9 aa, Homo sapiens
LFWLGLTYG

SEQ ID NO: 129149 - protein, 9 aa, Homo sapiens
FWLGLTYGS

SEQ ID NO: 129150 - protein, 9 aa, Homo sapiens
WLGLTYGSP

SEQ ID NO: 129151 - protein, 9 aa, Homo sapiens
LGLTYGSPS

SEQ ID NO: 129152 - protein, 9 aa, Homo sapiens
GLTYGSPSE

SEQ ID NO: 129153 - protein, 9 aa, Homo sapiens
LTYGSPSEG

SEQ ID NO: 129154 - protein, 9 aa, Homo sapiens
TYGSPSEGF

SEQ ID NO: 129155 - protein, 9 aa, Homo sapiens
YGSPSEGFT

SEQ ID NO: 129156 - protein, 9 aa, Homo sapiens
GSPSEGFTW

SEQ ID NO: 129157 - protein, 9 aa, Homo sapiens
SPSEGFTWS

SEQ ID NO: 129158 - protein, 9 aa, Homo sapiens
PSEGFTWSD

SEQ ID NO: 129159 - protein, 9 aa, Homo sapiens
SEGFTWSDG

SEQ ID NO: 129160 - protein, 9 aa, Homo sapiens
EGFTWSDGS

SEQ ID NO: 129161 - protein, 9 aa, Homo sapiens
GFTWSDGSP

SEQ ID NO: 129162 - protein, 9 aa, Homo sapiens
FTWSDGSPV

SEQ ID NO: 129163 - protein, 9 aa, Homo sapiens
TWSDGSPVS

SEQ ID NO: 129164 - protein, 9 aa, Homo sapiens
WSDGSPVSY

SEQ ID NO: 129165 - protein, 9 aa, Homo sapiens
SDGSPVSYE

SEQ ID NO: 129166 - protein, 9 aa, Homo sapiens
DGSPVSYEN

SEQ ID NO: 129167 - protein, 9 aa, Homo sapiens
GSPVSYENW

SEQ ID NO: 129168 - protein, 9 aa, Homo sapiens
SPVSYENWA

SEQ ID NO: 129169 - protein, 9 aa, Homo sapiens
PVSYENWAY

SEQ ID NO: 129170 - protein, 9 aa, Homo sapiens
VSYENWAYG

SEQ ID NO: 129171 - protein, 9 aa, Homo sapiens
SYENWAYGE

SEQ ID NO: 129172 - protein, 9 aa, Homo sapiens
YENWAYGEP

SEQ ID NO: 129173 - protein, 9 aa, Homo sapiens
ENWAYGEPN

SEQ ID NO: 129174 - protein, 9 aa, Homo sapiens
NWAYGEPNN

SEQ ID NO: 129175 - protein, 9 aa, Homo sapiens
WAYGEPNNY

SEQ ID NO: 129176 - protein, 9 aa, Homo sapiens
AYGEPNNYQ

SEQ ID NO: 129177 - protein, 9 aa, Homo sapiens
YGEPNNYQN

SEQ ID NO: 129178 - protein, 9 aa, Homo sapiens
GEPNNYQNV

SEQ ID NO: 129179 - protein, 9 aa, Homo sapiens
EPNNYQNVE

SEQ ID NO: 129180 - protein, 9 aa, Homo sapiens
PNNYQNVEY

SEQ ID NO: 129181 - protein, 9 aa, Homo sapiens
NNYQNVEYC

SEQ ID NO: 129182 - protein, 9 aa, Homo sapiens
NYQNVEYCG

SEQ ID NO: 129183 - protein, 9 aa, Homo sapiens
YQNVEYCGE

SEQ ID NO: 129184 - protein, 9 aa, Homo sapiens
QNVEYCGEL

SEQ ID NO: 129185 - protein, 9 aa, Homo sapiens
NVEYCGELK

SEQ ID NO: 129186 - protein, 9 aa, Homo sapiens
VEYCGELKG

SEQ ID NO: 129187 - protein, 9 aa, Homo sapiens
EYCGELKGD

SEQ ID NO: 129188 - protein, 9 aa, Homo sapiens
YCGELKGDP

SEQ ID NO: 129189 - protein, 9 aa, Homo sapiens
CGELKGDPT

SEQ ID NO: 129190 - protein, 9 aa, Homo sapiens
GELKGDPTM

SEQ ID NO: 129191 - protein, 9 aa, Homo sapiens
ELKGDPTMS

SEQ ID NO: 129192 - protein, 9 aa, Homo sapiens
LKGDPTMSW

SEQ ID NO: 129193 - protein, 9 aa, Homo sapiens
KGDPTMSWN

SEQ ID NO: 129194 - protein, 9 aa, Homo sapiens
GDPTMSWND

SEQ ID NO: 129195 - protein, 9 aa, Homo sapiens
DPTMSWNDI

SEQ ID NO: 129196 - protein, 9 aa, Homo sapiens
PTMSWNDIN

SEQ ID NO: 129197 - protein, 9 aa, Homo sapiens
TMSWNDINC

SEQ ID NO: 129198 - protein, 9 aa, Homo sapiens
MSWNDINCE

SEQ ID NO: 129199 - protein, 9 aa, Homo sapiens
SWNDINCEH

SEQ ID NO: 129200 - protein, 9 aa, Homo sapiens
WNDINCEHL

SEQ ID NO: 129201 - protein, 9 aa, Homo sapiens
NDINCEHLN

SEQ ID NO: 129202 - protein, 9 aa, Homo sapiens
DINCEHLNN

SEQ ID NO: 129203 - protein, 9 aa, Homo sapiens
INCEHLNNW

SEQ ID NO: 129204 - protein, 9 aa, Homo sapiens
NCEHLNNWI

SEQ ID NO: 129205 - protein, 9 aa, Homo sapiens
CEHLNNWIC

SEQ ID NO: 129206 - protein, 9 aa, Homo sapiens
EHLNNWICQ

SEQ ID NO: 129207 - protein, 9 aa, Homo sapiens
HLNNWICQI

SEQ ID NO: 129208 - protein, 9 aa, Homo sapiens
LNNWICQIQ

SEQ ID NO: 129209 - protein, 9 aa, Homo sapiens
NNWICQIQK

SEQ ID NO: 129210 - protein, 9 aa, Homo sapiens
NWICQIQKG

SEQ ID NO: 129211 - protein, 9 aa, Homo sapiens
WICQIQKGQ

SEQ ID NO: 129212 - protein, 9 aa, Homo sapiens
ICQIQKGQT

SEQ ID NO: 129213 - protein, 9 aa, Homo sapiens
CQIQKGQTP

SEQ ID NO: 129214 - protein, 9 aa, Homo sapiens
QIQKGQTPK

SEQ ID NO: 129215 - protein, 9 aa, Homo sapiens
IQKGQTPKP

SEQ ID NO: 129216 - protein, 9 aa, Homo sapiens
QKGQTPKPE

SEQ ID NO: 129217 - protein, 9 aa, Homo sapiens
KGQTPKPEP

SEQ ID NO: 129218 - protein, 9 aa, Homo sapiens
GQTPKPEPT

SEQ ID NO: 129219 - protein, 9 aa, Homo sapiens
QTPKPEPTP

SEQ ID NO: 129220 - protein, 9 aa, Homo sapiens
TPKPEPTPA

SEQ ID NO: 129221 - protein, 9 aa, Homo sapiens
PKPEPTPAP

SEQ ID NO: 129222 - protein, 9 aa, Homo sapiens
KPEPTPAPQ

SEQ ID NO: 129223 - protein, 9 aa, Homo sapiens
PEPTPAPQD

SEQ ID NO: 129224 - protein, 9 aa, Homo sapiens
EPTPAPQDN

SEQ ID NO: 129225 - protein, 9 aa, Homo sapiens
PTPAPQDNP

SEQ ID NO: 129226 - protein, 9 aa, Homo sapiens
TPAPQDNPP

SEQ ID NO: 129227 - protein, 9 aa, Homo sapiens
PAPQDNPPV

SEQ ID NO: 129228 - protein, 9 aa, Homo sapiens
APQDNPPVT

SEQ ID NO: 129229 - protein, 9 aa, Homo sapiens
PQDNPPVTE

SEQ ID NO: 129230 - protein, 9 aa, Homo sapiens
QDNPPVTED

SEQ ID NO: 129231 - protein, 9 aa, Homo sapiens
DNPPVTEDG

SEQ ID NO: 129232 - protein, 9 aa, Homo sapiens
NPPVTEDGW

SEQ ID NO: 129233 - protein, 9 aa, Homo sapiens
PPVTEDGWV

SEQ ID NO: 129234 - protein, 9 aa, Homo sapiens
PVTEDGWVI

SEQ ID NO: 129235 - protein, 9 aa, Homo sapiens
VTEDGWVIY

SEQ ID NO: 129236 - protein, 9 aa, Homo sapiens
TEDGWVIYK

SEQ ID NO: 129237 - protein, 9 aa, Homo sapiens
EDGWVIYKD

SEQ ID NO: 129238 - protein, 9 aa, Homo sapiens
DGWVIYKDY

SEQ ID NO: 129239 - protein, 9 aa, Homo sapiens
GWVIYKDYQ

SEQ ID NO: 129240 - protein, 9 aa, Homo sapiens
WVIYKDYQY

SEQ ID NO: 129241 - protein, 9 aa, Homo sapiens
VIYKDYQYY

SEQ ID NO: 129242 - protein, 9 aa, Homo sapiens
IYKDYQYYF

SEQ ID NO: 129243 - protein, 9 aa, Homo sapiens
YKDYQYYFS

SEQ ID NO: 129244 - protein, 9 aa, Homo sapiens
KDYQYYFSK

SEQ ID NO: 129245 - protein, 9 aa, Homo sapiens
DYQYYFSKE

SEQ ID NO: 129246 - protein, 9 aa, Homo sapiens
YQYYFSKEK

SEQ ID NO: 129247 - protein, 9 aa, Homo sapiens
QYYFSKEKE

SEQ ID NO: 129248 - protein, 9 aa, Homo sapiens
YYFSKEKET

SEQ ID NO: 129249 - protein, 9 aa, Homo sapiens
YFSKEKETM

SEQ ID NO: 129250 - protein, 9 aa, Homo sapiens
FSKEKETMD

SEQ ID NO: 129251 - protein, 9 aa, Homo sapiens
SKEKETMDN

SEQ ID NO: 129252 - protein, 9 aa, Homo sapiens
KEKETMDNA

SEQ ID NO: 129253 - protein, 9 aa, Homo sapiens
EKETMDNAR

SEQ ID NO: 129254 - protein, 9 aa, Homo sapiens
KETMDNARA

SEQ ID NO: 129255 - protein, 9 aa, Homo sapiens
ETMDNARAF

SEQ ID NO: 129256 - protein, 9 aa, Homo sapiens
TMDNARAFC

SEQ ID NO: 129257 - protein, 9 aa, Homo sapiens
MDNARAFCK

SEQ ID NO: 129258 - protein, 9 aa, Homo sapiens
DNARAFCKR

SEQ ID NO: 129259 - protein, 9 aa, Homo sapiens
NARAFCKRN

SEQ ID NO: 129260 - protein, 9 aa, Homo sapiens
ARAFCKRNF

SEQ ID NO: 129261 - protein, 9 aa, Homo sapiens
RAFCKRNFG

SEQ ID NO: 129262 - protein, 9 aa, Homo sapiens
AFCKRNFGD

SEQ ID NO: 129263 - protein, 9 aa, Homo sapiens
FCKRNFGDL

SEQ ID NO: 129264 - protein, 9 aa, Homo sapiens
CKRNFGDLV

SEQ ID NO: 129265 - protein, 9 aa, Homo sapiens
KRNFGDLVS

SEQ ID NO: 129266 - protein, 9 aa, Homo sapiens
RNFGDLVSI

SEQ ID NO: 129267 - protein, 9 aa, Homo sapiens
NFGDLVSIQ

SEQ ID NO: 129268 - protein, 9 aa, Homo sapiens
FGDLVSIQS

SEQ ID NO: 129269 - protein, 9 aa, Homo sapiens
GDLVSIQSE

SEQ ID NO: 129270 - protein, 9 aa, Homo sapiens
DLVSIQSES

SEQ ID NO: 129271 - protein, 9 aa, Homo sapiens
LVSIQSESE

SEQ ID NO: 129272 - protein, 9 aa, Homo sapiens
VSIQSESEK

SEQ ID NO: 129273 - protein, 9 aa, Homo sapiens
SIQSESEKK

SEQ ID NO: 129274 - protein, 9 aa, Homo sapiens
IQSESEKKF

SEQ ID NO: 129275 - protein, 9 aa, Homo sapiens
QSESEKKFL

SEQ ID NO: 129276 - protein, 9 aa, Homo sapiens
SESEKKFLW

SEQ ID NO: 129277 - protein, 9 aa, Homo sapiens
ESEKKFLWK

SEQ ID NO: 129278 - protein, 9 aa, Homo sapiens
SEKKFLWKY

SEQ ID NO: 129279 - protein, 9 aa, Homo sapiens
EKKFLWKYV

SEQ ID NO: 129280 - protein, 9 aa, Homo sapiens
KKFLWKYVN

SEQ ID NO: 129281 - protein, 9 aa, Homo sapiens
KFLWKYVNR

SEQ ID NO: 129282 - protein, 9 aa, Homo sapiens
FLWKYVNRN

SEQ ID NO: 129283 - protein, 9 aa, Homo sapiens
LWKYVNRND

SEQ ID NO: 129284 - protein, 9 aa, Homo sapiens
WKYVNRNDA

SEQ ID NO: 129285 - protein, 9 aa, Homo sapiens
KYVNRNDAQ

SEQ ID NO: 129286 - protein, 9 aa, Homo sapiens
YVNRNDAQS

SEQ ID NO: 129287 - protein, 9 aa, Homo sapiens
VNRNDAQSA

SEQ ID NO: 129288 - protein, 9 aa, Homo sapiens
NRNDAQSAY

SEQ ID NO: 129289 - protein, 9 aa, Homo sapiens
RNDAQSAYF

SEQ ID NO: 129290 - protein, 9 aa, Homo sapiens
NDAQSAYFI

SEQ ID NO: 129291 - protein, 9 aa, Homo sapiens
DAQSAYFIG

SEQ ID NO: 129292 - protein, 9 aa, Homo sapiens
AQSAYFIGL

SEQ ID NO: 129293 - protein, 9 aa, Homo sapiens
QSAYFIGLL

SEQ ID NO: 129294 - protein, 9 aa, Homo sapiens
SAYFIGLLI

SEQ ID NO: 129295 - protein, 9 aa, Homo sapiens
AYFIGLLIS

SEQ ID NO: 129296 - protein, 9 aa, Homo sapiens
YFIGLLISL

SEQ ID NO: 129297 - protein, 9 aa, Homo sapiens
FIGLLISLD

SEQ ID NO: 129298 - protein, 9 aa, Homo sapiens
IGLLISLDK

SEQ ID NO: 129299 - protein, 9 aa, Homo sapiens
GLLISLDKK

SEQ ID NO: 129300 - protein, 9 aa, Homo sapiens
LLISLDKKF

SEQ ID NO: 129301 - protein, 9 aa, Homo sapiens
LISLDKKFA

SEQ ID NO: 129302 - protein, 9 aa, Homo sapiens
ISLDKKFAW

SEQ ID NO: 129303 - protein, 9 aa, Homo sapiens
SLDKKFAWM

SEQ ID NO: 129304 - protein, 9 aa, Homo sapiens
LDKKFAWMD

SEQ ID NO: 129305 - protein, 9 aa, Homo sapiens
DKKFAWMDG

SEQ ID NO: 129306 - protein, 9 aa, Homo sapiens
KKFAWMDGS

SEQ ID NO: 129307 - protein, 9 aa, Homo sapiens
KFAWMDGSK

SEQ ID NO: 129308 - protein, 9 aa, Homo sapiens
FAWMDGSKV

SEQ ID NO: 129309 - protein, 9 aa, Homo sapiens
AWMDGSKVD

SEQ ID NO: 129310 - protein, 9 aa, Homo sapiens
WMDGSKVDY

SEQ ID NO: 129311 - protein, 9 aa, Homo sapiens
MDGSKVDYV

SEQ ID NO: 129312 - protein, 9 aa, Homo sapiens
DGSKVDYVS

SEQ ID NO: 129313 - protein, 9 aa, Homo sapiens
GSKVDYVSW

SEQ ID NO: 129314 - protein, 9 aa, Homo sapiens
SKVDYVSWA

SEQ ID NO: 129315 - protein, 9 aa, Homo sapiens
KVDYVSWAT

SEQ ID NO: 129316 - protein, 9 aa, Homo sapiens
VDYVSWATG

SEQ ID NO: 129317 - protein, 9 aa, Homo sapiens
DYVSWATGE

SEQ ID NO: 129318 - protein, 9 aa, Homo sapiens
YVSWATGEP

SEQ ID NO: 129319 - protein, 9 aa, Homo sapiens
VSWATGEPN

SEQ ID NO: 129320 - protein, 9 aa, Homo sapiens
SWATGEPNF

SEQ ID NO: 129321 - protein, 9 aa, Homo sapiens
WATGEPNFA

SEQ ID NO: 129322 - protein, 9 aa, Homo sapiens
ATGEPNFAN

SEQ ID NO: 129323 - protein, 9 aa, Homo sapiens
TGEPNFANE

SEQ ID NO: 129324 - protein, 9 aa, Homo sapiens
GEPNFANED

SEQ ID NO: 129325 - protein, 9 aa, Homo sapiens
EPNFANEDE

SEQ ID NO: 129326 - protein, 9 aa, Homo sapiens
PNFANEDEN

SEQ ID NO: 129327 - protein, 9 aa, Homo sapiens
NFANEDENC

SEQ ID NO: 129328 - protein, 9 aa, Homo sapiens
FANEDENCV

SEQ ID NO: 129329 - protein, 9 aa, Homo sapiens
ANEDENCVT

SEQ ID NO: 129330 - protein, 9 aa, Homo sapiens
NEDENCVTM

SEQ ID NO: 129331 - protein, 9 aa, Homo sapiens
EDENCVTMY

SEQ ID NO: 129332 - protein, 9 aa, Homo sapiens
DENCVTMYS

SEQ ID NO: 129333 - protein, 9 aa, Homo sapiens
ENCVTMYSN

SEQ ID NO: 129334 - protein, 9 aa, Homo sapiens
NCVTMYSNS

SEQ ID NO: 129335 - protein, 9 aa, Homo sapiens
CVTMYSNSG

SEQ ID NO: 129336 - protein, 9 aa, Homo sapiens
VTMYSNSGF

SEQ ID NO: 129337 - protein, 9 aa, Homo sapiens
TMYSNSGFW

SEQ ID NO: 129338 - protein, 9 aa, Homo sapiens
MYSNSGFWN

SEQ ID NO: 129339 - protein, 9 aa, Homo sapiens
YSNSGFWND

SEQ ID NO: 129340 - protein, 9 aa, Homo sapiens
SNSGFWNDI

SEQ ID NO: 129341 - protein, 9 aa, Homo sapiens
NSGFWNDIN

SEQ ID NO: 129342 - protein, 9 aa, Homo sapiens
SGFWNDINC

SEQ ID NO: 129343 - protein, 9 aa, Homo sapiens
GFWNDINCG

SEQ ID NO: 129344 - protein, 9 aa, Homo sapiens
FWNDINCGY

SEQ ID NO: 129345 - protein, 9 aa, Homo sapiens
WNDINCGYP

SEQ ID NO: 129346 - protein, 9 aa, Homo sapiens
NDINCGYPN

SEQ ID NO: 129347 - protein, 9 aa, Homo sapiens
DINCGYPNA

SEQ ID NO: 129348 - protein, 9 aa, Homo sapiens
INCGYPNAF

SEQ ID NO: 129349 - protein, 9 aa, Homo sapiens
NCGYPNAFI

SEQ ID NO: 129350 - protein, 9 aa, Homo sapiens
CGYPNAFIC

SEQ ID NO: 129351 - protein, 9 aa, Homo sapiens
GYPNAFICQ

SEQ ID NO: 129352 - protein, 9 aa, Homo sapiens
YPNAFICQR

SEQ ID NO: 129353 - protein, 9 aa, Homo sapiens
PNAFICQRH

SEQ ID NO: 129354 - protein, 9 aa, Homo sapiens
NAFICQRHN

SEQ ID NO: 129355 - protein, 9 aa, Homo sapiens
AFICQRHNS

SEQ ID NO: 129356 - protein, 9 aa, Homo sapiens
FICQRHNSS

SEQ ID NO: 129357 - protein, 9 aa, Homo sapiens
ICQRHNSSI

SEQ ID NO: 129358 - protein, 9 aa, Homo sapiens
CQRHNSSIN

SEQ ID NO: 129359 - protein, 9 aa, Homo sapiens
QRHNSSINA

SEQ ID NO: 129360 - protein, 9 aa, Homo sapiens
RHNSSINAT

SEQ ID NO: 129361 - protein, 9 aa, Homo sapiens
HNSSINATT

SEQ ID NO: 129362 - protein, 9 aa, Homo sapiens
NSSINATTV

SEQ ID NO: 129363 - protein, 9 aa, Homo sapiens
SSINATTVM

SEQ ID NO: 129364 - protein, 9 aa, Homo sapiens
SINATTVMP

SEQ ID NO: 129365 - protein, 9 aa, Homo sapiens
INATTVMPT

SEQ ID NO: 129366 - protein, 9 aa, Homo sapiens
NATTVMPTM

SEQ ID NO: 129367 - protein, 9 aa, Homo sapiens
ATTVMPTMP

SEQ ID NO: 129368 - protein, 9 aa, Homo sapiens
TTVMPTMPS

SEQ ID NO: 129369 - protein, 9 aa, Homo sapiens
TVMPTMPSV

SEQ ID NO: 129370 - protein, 9 aa, Homo sapiens
VMPTMPSVP

SEQ ID NO: 129371 - protein, 9 aa, Homo sapiens
MPTMPSVPS

SEQ ID NO: 129372 - protein, 9 aa, Homo sapiens
PTMPSVPSG

SEQ ID NO: 129373 - protein, 9 aa, Homo sapiens
TMPSVPSGC

SEQ ID NO: 129374 - protein, 9 aa, Homo sapiens
MPSVPSGCK

SEQ ID NO: 129375 - protein, 9 aa, Homo sapiens
PSVPSGCKE

SEQ ID NO: 129376 - protein, 9 aa, Homo sapiens
SVPSGCKEG

SEQ ID NO: 129377 - protein, 9 aa, Homo sapiens
VPSGCKEGW

SEQ ID NO: 129378 - protein, 9 aa, Homo sapiens
PSGCKEGWN

SEQ ID NO: 129379 - protein, 9 aa, Homo sapiens
SGCKEGWNF

SEQ ID NO: 129380 - protein, 9 aa, Homo sapiens
GCKEGWNFY

SEQ ID NO: 129381 - protein, 9 aa, Homo sapiens
CKEGWNFYS

SEQ ID NO: 129382 - protein, 9 aa, Homo sapiens
KEGWNFYSN

SEQ ID NO: 129383 - protein, 9 aa, Homo sapiens
EGWNFYSNK

SEQ ID NO: 129384 - protein, 9 aa, Homo sapiens
GWNFYSNKC

SEQ ID NO: 129385 - protein, 9 aa, Homo sapiens
WNFYSNKCF

SEQ ID NO: 129386 - protein, 9 aa, Homo sapiens
NFYSNKCFK

SEQ ID NO: 129387 - protein, 9 aa, Homo sapiens
FYSNKCFKI

SEQ ID NO: 129388 - protein, 9 aa, Homo sapiens
YSNKCFKIF

SEQ ID NO: 129389 - protein, 9 aa, Homo sapiens
SNKCFKIFG

SEQ ID NO: 129390 - protein, 9 aa, Homo sapiens
NKCFKIFGF

SEQ ID NO: 129391 - protein, 9 aa, Homo sapiens
KCFKIFGFM

SEQ ID NO: 129392 - protein, 9 aa, Homo sapiens
CFKIFGFME

SEQ ID NO: 129393 - protein, 9 aa, Homo sapiens
FKIFGFMEE

SEQ ID NO: 129394 - protein, 9 aa, Homo sapiens
KIFGFMEEE

SEQ ID NO: 129395 - protein, 9 aa, Homo sapiens
IFGFMEEER

SEQ ID NO: 129396 - protein, 9 aa, Homo sapiens
FGFMEEERK

SEQ ID NO: 129397 - protein, 9 aa, Homo sapiens
GFMEEERKN

SEQ ID NO: 129398 - protein, 9 aa, Homo sapiens
FMEEERKNW

SEQ ID NO: 129399 - protein, 9 aa, Homo sapiens
MEEERKNWQ

SEQ ID NO: 129400 - protein, 9 aa, Homo sapiens
EEERKNWQE

SEQ ID NO: 129401 - protein, 9 aa, Homo sapiens
EERKNWQEA

SEQ ID NO: 129402 - protein, 9 aa, Homo sapiens
ERKNWQEAR

SEQ ID NO: 129403 - protein, 9 aa, Homo sapiens
RKNWQEARK

SEQ ID NO: 129404 - protein, 9 aa, Homo sapiens
KNWQEARKA

SEQ ID NO: 129405 - protein, 9 aa, Homo sapiens
NWQEARKAC

SEQ ID NO: 129406 - protein, 9 aa, Homo sapiens
WQEARKACI

SEQ ID NO: 129407 - protein, 9 aa, Homo sapiens
QEARKACIG

SEQ ID NO: 129408 - protein, 9 aa, Homo sapiens
EARKACIGF

SEQ ID NO: 129409 - protein, 9 aa, Homo sapiens
ARKACIGFG

SEQ ID NO: 129410 - protein, 9 aa, Homo sapiens
RKACIGFGG

SEQ ID NO: 129411 - protein, 9 aa, Homo sapiens
KACIGFGGN

SEQ ID NO: 129412 - protein, 9 aa, Homo sapiens
ACIGFGGNL

SEQ ID NO: 129413 - protein, 9 aa, Homo sapiens
CIGFGGNLV

SEQ ID NO: 129414 - protein, 9 aa, Homo sapiens
IGFGGNLVS

SEQ ID NO: 129415 - protein, 9 aa, Homo sapiens
GFGGNLVSI

SEQ ID NO: 129416 - protein, 9 aa, Homo sapiens
FGGNLVSIQ

SEQ ID NO: 129417 - protein, 9 aa, Homo sapiens
GGNLVSIQN

SEQ ID NO: 129418 - protein, 9 aa, Homo sapiens
GNLVSIQNE

SEQ ID NO: 129419 - protein, 9 aa, Homo sapiens
NLVSIQNEK

SEQ ID NO: 129420 - protein, 9 aa, Homo sapiens
LVSIQNEKE

SEQ ID NO: 129421 - protein, 9 aa, Homo sapiens
VSIQNEKEQ

SEQ ID NO: 129422 - protein, 9 aa, Homo sapiens
SIQNEKEQA

SEQ ID NO: 129423 - protein, 9 aa, Homo sapiens
IQNEKEQAF

SEQ ID NO: 129424 - protein, 9 aa, Homo sapiens
QNEKEQAFL

SEQ ID NO: 129425 - protein, 9 aa, Homo sapiens
NEKEQAFLT

SEQ ID NO: 129426 - protein, 9 aa, Homo sapiens
EKEQAFLTY

SEQ ID NO: 129427 - protein, 9 aa, Homo sapiens
KEQAFLTYH

SEQ ID NO: 129428 - protein, 9 aa, Homo sapiens
EQAFLTYHM

SEQ ID NO: 129429 - protein, 9 aa, Homo sapiens
QAFLTYHMK

SEQ ID NO: 129430 - protein, 9 aa, Homo sapiens
AFLTYHMKD

SEQ ID NO: 129431 - protein, 9 aa, Homo sapiens
FLTYHMKDS

SEQ ID NO: 129432 - protein, 9 aa, Homo sapiens
LTYHMKDST

SEQ ID NO: 129433 - protein, 9 aa, Homo sapiens
TYHMKDSTF

SEQ ID NO: 129434 - protein, 9 aa, Homo sapiens
YHMKDSTFS

SEQ ID NO: 129435 - protein, 9 aa, Homo sapiens
HMKDSTFSA

SEQ ID NO: 129436 - protein, 9 aa, Homo sapiens
MKDSTFSAW

SEQ ID NO: 129437 - protein, 9 aa, Homo sapiens
KDSTFSAWT

SEQ ID NO: 129438 - protein, 9 aa, Homo sapiens
DSTFSAWTG

SEQ ID NO: 129439 - protein, 9 aa, Homo sapiens
STFSAWTGL

SEQ ID NO: 129440 - protein, 9 aa, Homo sapiens
TFSAWTGLN

SEQ ID NO: 129441 - protein, 9 aa, Homo sapiens
FSAWTGLND

SEQ ID NO: 129442 - protein, 9 aa, Homo sapiens
SAWTGLNDV

SEQ ID NO: 129443 - protein, 9 aa, Homo sapiens
AWTGLNDVN

SEQ ID NO: 129444 - protein, 9 aa, Homo sapiens
WTGLNDVNS

SEQ ID NO: 129445 - protein, 9 aa, Homo sapiens
TGLNDVNSE

SEQ ID NO: 129446 - protein, 9 aa, Homo sapiens
GLNDVNSEH

SEQ ID NO: 129447 - protein, 9 aa, Homo sapiens
LNDVNSEHT

SEQ ID NO: 129448 - protein, 9 aa, Homo sapiens
NDVNSEHTF

SEQ ID NO: 129449 - protein, 9 aa, Homo sapiens
DVNSEHTFL

SEQ ID NO: 129450 - protein, 9 aa, Homo sapiens
VNSEHTFLW

SEQ ID NO: 129451 - protein, 9 aa, Homo sapiens
NSEHTFLWT

SEQ ID NO: 129452 - protein, 9 aa, Homo sapiens
SEHTFLWTD

SEQ ID NO: 129453 - protein, 9 aa, Homo sapiens
EHTFLWTDG

SEQ ID NO: 129454 - protein, 9 aa, Homo sapiens
HTFLWTDGR

SEQ ID NO: 129455 - protein, 9 aa, Homo sapiens
TFLWTDGRG

SEQ ID NO: 129456 - protein, 9 aa, Homo sapiens
FLWTDGRGV

SEQ ID NO: 129457 - protein, 9 aa, Homo sapiens
LWTDGRGVH

SEQ ID NO: 129458 - protein, 9 aa, Homo sapiens
WTDGRGVHY

SEQ ID NO: 129459 - protein, 9 aa, Homo sapiens
TDGRGVHYT

SEQ ID NO: 129460 - protein, 9 aa, Homo sapiens
DGRGVHYTN

SEQ ID NO: 129461 - protein, 9 aa, Homo sapiens
GRGVHYTNW

SEQ ID NO: 129462 - protein, 9 aa, Homo sapiens
RGVHYTNWG

SEQ ID NO: 129463 - protein, 9 aa, Homo sapiens
GVHYTNWGK

SEQ ID NO: 129464 - protein, 9 aa, Homo sapiens
VHYTNWGKG

SEQ ID NO: 129465 - protein, 9 aa, Homo sapiens
HYTNWGKGY

SEQ ID NO: 129466 - protein, 9 aa, Homo sapiens
YTNWGKGYP

SEQ ID NO: 129467 - protein, 9 aa, Homo sapiens
TNWGKGYPG

SEQ ID NO: 129468 - protein, 9 aa, Homo sapiens
NWGKGYPGG

SEQ ID NO: 129469 - protein, 9 aa, Homo sapiens
WGKGYPGGR

SEQ ID NO: 129470 - protein, 9 aa, Homo sapiens
GKGYPGGRR

SEQ ID NO: 129471 - protein, 9 aa, Homo sapiens
KGYPGGRRS

SEQ ID NO: 129472 - protein, 9 aa, Homo sapiens
GYPGGRRSS

SEQ ID NO: 129473 - protein, 9 aa, Homo sapiens
YPGGRRSSL

SEQ ID NO: 129474 - protein, 9 aa, Homo sapiens
PGGRRSSLS

SEQ ID NO: 129475 - protein, 9 aa, Homo sapiens
GGRRSSLSY

SEQ ID NO: 129476 - protein, 9 aa, Homo sapiens
GRRSSLSYE

SEQ ID NO: 129477 - protein, 9 aa, Homo sapiens
RRSSLSYED

SEQ ID NO: 129478 - protein, 9 aa, Homo sapiens
RSSLSYEDA

SEQ ID NO: 129479 - protein, 9 aa, Homo sapiens
SSLSYEDAD

SEQ ID NO: 129480 - protein, 9 aa, Homo sapiens
SLSYEDADC

SEQ ID NO: 129481 - protein, 9 aa, Homo sapiens
LSYEDADCV

SEQ ID NO: 129482 - protein, 9 aa, Homo sapiens
SYEDADCVV

SEQ ID NO: 129483 - protein, 9 aa, Homo sapiens
YEDADCVVI

SEQ ID NO: 129484 - protein, 9 aa, Homo sapiens
EDADCVVII

SEQ ID NO: 129485 - protein, 9 aa, Homo sapiens
DADCVVIIG

SEQ ID NO: 129486 - protein, 9 aa, Homo sapiens
ADCVVIIGG

SEQ ID NO: 129487 - protein, 9 aa, Homo sapiens
DCVVIIGGA

SEQ ID NO: 129488 - protein, 9 aa, Homo sapiens
CVVIIGGAS

SEQ ID NO: 129489 - protein, 9 aa, Homo sapiens
VVIIGGASN

SEQ ID NO: 129490 - protein, 9 aa, Homo sapiens
VIIGGASNE

SEQ ID NO: 129491 - protein, 9 aa, Homo sapiens
IIGGASNEA

SEQ ID NO: 129492 - protein, 9 aa, Homo sapiens
IGGASNEAG

SEQ ID NO: 129493 - protein, 9 aa, Homo sapiens
GGASNEAGK

SEQ ID NO: 129494 - protein, 9 aa, Homo sapiens
GASNEAGKW

SEQ ID NO: 129495 - protein, 9 aa, Homo sapiens
ASNEAGKWM

SEQ ID NO: 129496 - protein, 9 aa, Homo sapiens
SNEAGKWMD

SEQ ID NO: 129497 - protein, 9 aa, Homo sapiens
NEAGKWMDD

SEQ ID NO: 129498 - protein, 9 aa, Homo sapiens
EAGKWMDDT

SEQ ID NO: 129499 - protein, 9 aa, Homo sapiens
AGKWMDDTC

SEQ ID NO: 129500 - protein, 9 aa, Homo sapiens
GKWMDDTCD

SEQ ID NO: 129501 - protein, 9 aa, Homo sapiens
KWMDDTCDS

SEQ ID NO: 129502 - protein, 9 aa, Homo sapiens
WMDDTCDSK

SEQ ID NO: 129503 - protein, 9 aa, Homo sapiens
MDDTCDSKR

SEQ ID NO: 129504 - protein, 9 aa, Homo sapiens
DDTCDSKRG

SEQ ID NO: 129505 - protein, 9 aa, Homo sapiens
DTCDSKRGY

SEQ ID NO: 129506 - protein, 9 aa, Homo sapiens
TCDSKRGYI

SEQ ID NO: 129507 - protein, 9 aa, Homo sapiens
CDSKRGYIC

SEQ ID NO: 129508 - protein, 9 aa, Homo sapiens
DSKRGYICQ

SEQ ID NO: 129509 - protein, 9 aa, Homo sapiens
SKRGYICQT

SEQ ID NO: 129510 - protein, 9 aa, Homo sapiens
KRGYICQTR

SEQ ID NO: 129511 - protein, 9 aa, Homo sapiens
RGYICQTRS

SEQ ID NO: 129512 - protein, 9 aa, Homo sapiens
GYICQTRSD

SEQ ID NO: 129513 - protein, 9 aa, Homo sapiens
YICQTRSDP

SEQ ID NO: 129514 - protein, 9 aa, Homo sapiens
ICQTRSDPS

SEQ ID NO: 129515 - protein, 9 aa, Homo sapiens
CQTRSDPSL

SEQ ID NO: 129516 - protein, 9 aa, Homo sapiens
QTRSDPSLT

SEQ ID NO: 129517 - protein, 9 aa, Homo sapiens
TRSDPSLTN

SEQ ID NO: 129518 - protein, 9 aa, Homo sapiens
RSDPSLTNP

SEQ ID NO: 129519 - protein, 9 aa, Homo sapiens
SDPSLTNPP

SEQ ID NO: 129520 - protein, 9 aa, Homo sapiens
DPSLTNPPA

SEQ ID NO: 129521 - protein, 9 aa, Homo sapiens
PSLTNPPAT

SEQ ID NO: 129522 - protein, 9 aa, Homo sapiens
SLTNPPATI

SEQ ID NO: 129523 - protein, 9 aa, Homo sapiens
LTNPPATIQ

SEQ ID NO: 129524 - protein, 9 aa, Homo sapiens
TNPPATIQT

SEQ ID NO: 129525 - protein, 9 aa, Homo sapiens
NPPATIQTD

SEQ ID NO: 129526 - protein, 9 aa, Homo sapiens
PPATIQTDG

SEQ ID NO: 129527 - protein, 9 aa, Homo sapiens
PATIQTDGF

SEQ ID NO: 129528 - protein, 9 aa, Homo sapiens
ATIQTDGFV

SEQ ID NO: 129529 - protein, 9 aa, Homo sapiens
TIQTDGFVK

SEQ ID NO: 129530 - protein, 9 aa, Homo sapiens
IQTDGFVKY

SEQ ID NO: 129531 - protein, 9 aa, Homo sapiens
QTDGFVKYG

SEQ ID NO: 129532 - protein, 9 aa, Homo sapiens
TDGFVKYGK

SEQ ID NO: 129533 - protein, 9 aa, Homo sapiens
DGFVKYGKS

SEQ ID NO: 129534 - protein, 9 aa, Homo sapiens
GFVKYGKSS

SEQ ID NO: 129535 - protein, 9 aa, Homo sapiens
FVKYGKSSY

SEQ ID NO: 129536 - protein, 9 aa, Homo sapiens
VKYGKSSYS

SEQ ID NO: 129537 - protein, 9 aa, Homo sapiens
KYGKSSYSL

SEQ ID NO: 129538 - protein, 9 aa, Homo sapiens
YGKSSYSLM

SEQ ID NO: 129539 - protein, 9 aa, Homo sapiens
GKSSYSLMR

SEQ ID NO: 129540 - protein, 9 aa, Homo sapiens
KSSYSLMRQ

SEQ ID NO: 129541 - protein, 9 aa, Homo sapiens
SSYSLMRQK

SEQ ID NO: 129542 - protein, 9 aa, Homo sapiens
SYSLMRQKF

SEQ ID NO: 129543 - protein, 9 aa, Homo sapiens
YSLMRQKFQ

SEQ ID NO: 129544 - protein, 9 aa, Homo sapiens
SLMRQKFQW

SEQ ID NO: 129545 - protein, 9 aa, Homo sapiens
LMRQKFQWH

SEQ ID NO: 129546 - protein, 9 aa, Homo sapiens
MRQKFQWHE

SEQ ID NO: 129547 - protein, 9 aa, Homo sapiens
RQKFQWHEA

SEQ ID NO: 129548 - protein, 9 aa, Homo sapiens
QKFQWHEAE

SEQ ID NO: 129549 - protein, 9 aa, Homo sapiens
KFQWHEAET

SEQ ID NO: 129550 - protein, 9 aa, Homo sapiens
FQWHEAETY

SEQ ID NO: 129551 - protein, 9 aa, Homo sapiens
QWHEAETYC

SEQ ID NO: 129552 - protein, 9 aa, Homo sapiens
WHEAETYCK

SEQ ID NO: 129553 - protein, 9 aa, Homo sapiens
HEAETYCKL

SEQ ID NO: 129554 - protein, 9 aa, Homo sapiens
EAETYCKLH

SEQ ID NO: 129555 - protein, 9 aa, Homo sapiens
AETYCKLHN

SEQ ID NO: 129556 - protein, 9 aa, Homo sapiens
ETYCKLHNS

SEQ ID NO: 129557 - protein, 9 aa, Homo sapiens
TYCKLHNSL

SEQ ID NO: 129558 - protein, 9 aa, Homo sapiens
YCKLHNSLI

SEQ ID NO: 129559 - protein, 9 aa, Homo sapiens
CKLHNSLIA

SEQ ID NO: 129560 - protein, 9 aa, Homo sapiens
KLHNSLIAS

SEQ ID NO: 129561 - protein, 9 aa, Homo sapiens
LHNSLIASI

SEQ ID NO: 129562 - protein, 9 aa, Homo sapiens
HNSLIASIL

SEQ ID NO: 129563 - protein, 9 aa, Homo sapiens
NSLIASILD

SEQ ID NO: 129564 - protein, 9 aa, Homo sapiens
SLIASILDP

SEQ ID NO: 129565 - protein, 9 aa, Homo sapiens
LIASILDPY

SEQ ID NO: 129566 - protein, 9 aa, Homo sapiens
IASILDPYS

SEQ ID NO: 129567 - protein, 9 aa, Homo sapiens
ASILDPYSN

SEQ ID NO: 129568 - protein, 9 aa, Homo sapiens
SILDPYSNA

SEQ ID NO: 129569 - protein, 9 aa, Homo sapiens
ILDPYSNAF

SEQ ID NO: 129570 - protein, 9 aa, Homo sapiens
LDPYSNAFA

SEQ ID NO: 129571 - protein, 9 aa, Homo sapiens
DPYSNAFAW

SEQ ID NO: 129572 - protein, 9 aa, Homo sapiens
PYSNAFAWL

SEQ ID NO: 129573 - protein, 9 aa, Homo sapiens
YSNAFAWLQ

SEQ ID NO: 129574 - protein, 9 aa, Homo sapiens
SNAFAWLQM

SEQ ID NO: 129575 - protein, 9 aa, Homo sapiens
NAFAWLQME

SEQ ID NO: 129576 - protein, 9 aa, Homo sapiens
AFAWLQMET

SEQ ID NO: 129577 - protein, 9 aa, Homo sapiens
FAWLQMETS

SEQ ID NO: 129578 - protein, 9 aa, Homo sapiens
AWLQMETSN

SEQ ID NO: 129579 - protein, 9 aa, Homo sapiens
WLQMETSNE

SEQ ID NO: 129580 - protein, 9 aa, Homo sapiens
LQMETSNER

SEQ ID NO: 129581 - protein, 9 aa, Homo sapiens
QMETSNERV

SEQ ID NO: 129582 - protein, 9 aa, Homo sapiens
METSNERVW

SEQ ID NO: 129583 - protein, 9 aa, Homo sapiens
ETSNERVWI

SEQ ID NO: 129584 - protein, 9 aa, Homo sapiens
TSNERVWIA

SEQ ID NO: 129585 - protein, 9 aa, Homo sapiens
SNERVWIAL

SEQ ID NO: 129586 - protein, 9 aa, Homo sapiens
NERVWIALN

SEQ ID NO: 129587 - protein, 9 aa, Homo sapiens
ERVWIALNS

SEQ ID NO: 129588 - protein, 9 aa, Homo sapiens
RVWIALNSN

SEQ ID NO: 129589 - protein, 9 aa, Homo sapiens
VWIALNSNL

SEQ ID NO: 129590 - protein, 9 aa, Homo sapiens
WIALNSNLT

SEQ ID NO: 129591 - protein, 9 aa, Homo sapiens
IALNSNLTD

SEQ ID NO: 129592 - protein, 9 aa, Homo sapiens
ALNSNLTDN

SEQ ID NO: 129593 - protein, 9 aa, Homo sapiens
LNSNLTDNQ

SEQ ID NO: 129594 - protein, 9 aa, Homo sapiens
NSNLTDNQY

SEQ ID NO: 129595 - protein, 9 aa, Homo sapiens
SNLTDNQYT

SEQ ID NO: 129596 - protein, 9 aa, Homo sapiens
NLTDNQYTW

SEQ ID NO: 129597 - protein, 9 aa, Homo sapiens
LTDNQYTWT

SEQ ID NO: 129598 - protein, 9 aa, Homo sapiens
TDNQYTWTD

SEQ ID NO: 129599 - protein, 9 aa, Homo sapiens
DNQYTWTDK

SEQ ID NO: 129600 - protein, 9 aa, Homo sapiens
NQYTWTDKW

SEQ ID NO: 129601 - protein, 9 aa, Homo sapiens
QYTWTDKWR

SEQ ID NO: 129602 - protein, 9 aa, Homo sapiens
YTWTDKWRV

SEQ ID NO: 129603 - protein, 9 aa, Homo sapiens
TWTDKWRVR

SEQ ID NO: 129604 - protein, 9 aa, Homo sapiens
WTDKWRVRY

SEQ ID NO: 129605 - protein, 9 aa, Homo sapiens
TDKWRVRYT

SEQ ID NO: 129606 - protein, 9 aa, Homo sapiens
DKWRVRYTN

SEQ ID NO: 129607 - protein, 9 aa, Homo sapiens
KWRVRYTNW

SEQ ID NO: 129608 - protein, 9 aa, Homo sapiens
WRVRYTNWA

SEQ ID NO: 129609 - protein, 9 aa, Homo sapiens
RVRYTNWAA

SEQ ID NO: 129610 - protein, 9 aa, Homo sapiens
VRYTNWAAD

SEQ ID NO: 129611 - protein, 9 aa, Homo sapiens
RYTNWAADE

SEQ ID NO: 129612 - protein, 9 aa, Homo sapiens
YTNWAADEP

SEQ ID NO: 129613 - protein, 9 aa, Homo sapiens
TNWAADEPK

SEQ ID NO: 129614 - protein, 9 aa, Homo sapiens
NWAADEPKL

SEQ ID NO: 129615 - protein, 9 aa, Homo sapiens
WAADEPKLK

SEQ ID NO: 129616 - protein, 9 aa, Homo sapiens
AADEPKLKS

SEQ ID NO: 129617 - protein, 9 aa, Homo sapiens
ADEPKLKSA

SEQ ID NO: 129618 - protein, 9 aa, Homo sapiens
DEPKLKSAC

SEQ ID NO: 129619 - protein, 9 aa, Homo sapiens
EPKLKSACV

SEQ ID NO: 129620 - protein, 9 aa, Homo sapiens
PKLKSACVY

SEQ ID NO: 129621 - protein, 9 aa, Homo sapiens
KLKSACVYL

SEQ ID NO: 129622 - protein, 9 aa, Homo sapiens
LKSACVYLD

SEQ ID NO: 129623 - protein, 9 aa, Homo sapiens
KSACVYLDL

SEQ ID NO: 129624 - protein, 9 aa, Homo sapiens
SACVYLDLD

SEQ ID NO: 129625 - protein, 9 aa, Homo sapiens
ACVYLDLDG

SEQ ID NO: 129626 - protein, 9 aa, Homo sapiens
CVYLDLDGY

SEQ ID NO: 129627 - protein, 9 aa, Homo sapiens
VYLDLDGYW

SEQ ID NO: 129628 - protein, 9 aa, Homo sapiens
YLDLDGYWK

SEQ ID NO: 129629 - protein, 9 aa, Homo sapiens
LDLDGYWKT

SEQ ID NO: 129630 - protein, 9 aa, Homo sapiens
DLDGYWKTA

SEQ ID NO: 129631 - protein, 9 aa, Homo sapiens
LDGYWKTAH

SEQ ID NO: 129632 - protein, 9 aa, Homo sapiens
DGYWKTAHC

SEQ ID NO: 129633 - protein, 9 aa, Homo sapiens
GYWKTAHCN

SEQ ID NO: 129634 - protein, 9 aa, Homo sapiens
YWKTAHCNE

SEQ ID NO: 129635 - protein, 9 aa, Homo sapiens
WKTAHCNES

SEQ ID NO: 129636 - protein, 9 aa, Homo sapiens
KTAHCNESF

SEQ ID NO: 129637 - protein, 9 aa, Homo sapiens
TAHCNESFY

SEQ ID NO: 129638 - protein, 9 aa, Homo sapiens
AHCNESFYF

SEQ ID NO: 129639 - protein, 9 aa, Homo sapiens
HCNESFYFL

SEQ ID NO: 129640 - protein, 9 aa, Homo sapiens
CNESFYFLC

SEQ ID NO: 129641 - protein, 9 aa, Homo sapiens
NESFYFLCK

SEQ ID NO: 129642 - protein, 9 aa, Homo sapiens
ESFYFLCKR

SEQ ID NO: 129643 - protein, 9 aa, Homo sapiens
SFYFLCKRS

SEQ ID NO: 129644 - protein, 9 aa, Homo sapiens
FYFLCKRSD

SEQ ID NO: 129645 - protein, 9 aa, Homo sapiens
YFLCKRSDE

SEQ ID NO: 129646 - protein, 9 aa, Homo sapiens
FLCKRSDEI

SEQ ID NO: 129647 - protein, 9 aa, Homo sapiens
LCKRSDEIP

SEQ ID NO: 129648 - protein, 9 aa, Homo sapiens
CKRSDEIPA

SEQ ID NO: 129649 - protein, 9 aa, Homo sapiens
KRSDEIPAT

SEQ ID NO: 129650 - protein, 9 aa, Homo sapiens
RSDEIPATE

SEQ ID NO: 129651 - protein, 9 aa, Homo sapiens
SDEIPATEP

SEQ ID NO: 129652 - protein, 9 aa, Homo sapiens
DEIPATEPP

SEQ ID NO: 129653 - protein, 9 aa, Homo sapiens
EIPATEPPQ

SEQ ID NO: 129654 - protein, 9 aa, Homo sapiens
IPATEPPQL

SEQ ID NO: 129655 - protein, 9 aa, Homo sapiens
PATEPPQLP

SEQ ID NO: 129656 - protein, 9 aa, Homo sapiens
ATEPPQLPG

SEQ ID NO: 129657 - protein, 9 aa, Homo sapiens
TEPPQLPGR

SEQ ID NO: 129658 - protein, 9 aa, Homo sapiens
EPPQLPGRC

SEQ ID NO: 129659 - protein, 9 aa, Homo sapiens
PPQLPGRCP

SEQ ID NO: 129660 - protein, 9 aa, Homo sapiens
PQLPGRCPE

SEQ ID NO: 129661 - protein, 9 aa, Homo sapiens
QLPGRCPES

SEQ ID NO: 129662 - protein, 9 aa, Homo sapiens
LPGRCPESD

SEQ ID NO: 129663 - protein, 9 aa, Homo sapiens
PGRCPESDH

SEQ ID NO: 129664 - protein, 9 aa, Homo sapiens
GRCPESDHT

SEQ ID NO: 129665 - protein, 9 aa, Homo sapiens
RCPESDHTA

SEQ ID NO: 129666 - protein, 9 aa, Homo sapiens
CPESDHTAW

SEQ ID NO: 129667 - protein, 9 aa, Homo sapiens
PESDHTAWI

SEQ ID NO: 129668 - protein, 9 aa, Homo sapiens
ESDHTAWIP

SEQ ID NO: 129669 - protein, 9 aa, Homo sapiens
SDHTAWIPF

SEQ ID NO: 129670 - protein, 9 aa, Homo sapiens
DHTAWIPFH

SEQ ID NO: 129671 - protein, 9 aa, Homo sapiens
HTAWIPFHG

SEQ ID NO: 129672 - protein, 9 aa, Homo sapiens
TAWIPFHGH

SEQ ID NO: 129673 - protein, 9 aa, Homo sapiens
AWIPFHGHC

SEQ ID NO: 129674 - protein, 9 aa, Homo sapiens
WIPFHGHCY

SEQ ID NO: 129675 - protein, 9 aa, Homo sapiens
IPFHGHCYY

SEQ ID NO: 129676 - protein, 9 aa, Homo sapiens
PFHGHCYYI

SEQ ID NO: 129677 - protein, 9 aa, Homo sapiens
FHGHCYYIE

SEQ ID NO: 129678 - protein, 9 aa, Homo sapiens
HGHCYYIES

SEQ ID NO: 129679 - protein, 9 aa, Homo sapiens
GHCYYIESS

SEQ ID NO: 129680 - protein, 9 aa, Homo sapiens
HCYYIESSY

SEQ ID NO: 129681 - protein, 9 aa, Homo sapiens
CYYIESSYT

SEQ ID NO: 129682 - protein, 9 aa, Homo sapiens
YYIESSYTR

SEQ ID NO: 129683 - protein, 9 aa, Homo sapiens
YIESSYTRN

SEQ ID NO: 129684 - protein, 9 aa, Homo sapiens
IESSYTRNW

SEQ ID NO: 129685 - protein, 9 aa, Homo sapiens
ESSYTRNWG

SEQ ID NO: 129686 - protein, 9 aa, Homo sapiens
SSYTRNWGQ

SEQ ID NO: 129687 - protein, 9 aa, Homo sapiens
SYTRNWGQA

SEQ ID NO: 129688 - protein, 9 aa, Homo sapiens
YTRNWGQAS

SEQ ID NO: 129689 - protein, 9 aa, Homo sapiens
TRNWGQASL

SEQ ID NO: 129690 - protein, 9 aa, Homo sapiens
RNWGQASLE

SEQ ID NO: 129691 - protein, 9 aa, Homo sapiens
NWGQASLEC

SEQ ID NO: 129692 - protein, 9 aa, Homo sapiens
WGQASLECL

SEQ ID NO: 129693 - protein, 9 aa, Homo sapiens
GQASLECLR

SEQ ID NO: 129694 - protein, 9 aa, Homo sapiens
QASLECLRM

SEQ ID NO: 129695 - protein, 9 aa, Homo sapiens
ASLECLRMG

SEQ ID NO: 129696 - protein, 9 aa, Homo sapiens
SLECLRMGS

SEQ ID NO: 129697 - protein, 9 aa, Homo sapiens
LECLRMGSS

SEQ ID NO: 129698 - protein, 9 aa, Homo sapiens
ECLRMGSSL

SEQ ID NO: 129699 - protein, 9 aa, Homo sapiens
CLRMGSSLV

SEQ ID NO: 129700 - protein, 9 aa, Homo sapiens
LRMGSSLVS

SEQ ID NO: 129701 - protein, 9 aa, Homo sapiens
RMGSSLVSI

SEQ ID NO: 129702 - protein, 9 aa, Homo sapiens
MGSSLVSIE

SEQ ID NO: 129703 - protein, 9 aa, Homo sapiens
GSSLVSIES

SEQ ID NO: 129704 - protein, 9 aa, Homo sapiens
SSLVSIESA

SEQ ID NO: 129705 - protein, 9 aa, Homo sapiens
SLVSIESAA

SEQ ID NO: 129706 - protein, 9 aa, Homo sapiens
LVSIESAAE

SEQ ID NO: 129707 - protein, 9 aa, Homo sapiens
VSIESAAES

SEQ ID NO: 129708 - protein, 9 aa, Homo sapiens
SIESAAESS

SEQ ID NO: 129709 - protein, 9 aa, Homo sapiens
IESAAESSF

SEQ ID NO: 129710 - protein, 9 aa, Homo sapiens
ESAAESSFL

SEQ ID NO: 129711 - protein, 9 aa, Homo sapiens
SAAESSFLS

SEQ ID NO: 129712 - protein, 9 aa, Homo sapiens
AAESSFLSY

SEQ ID NO: 129713 - protein, 9 aa, Homo sapiens
AESSFLSYR

SEQ ID NO: 129714 - protein, 9 aa, Homo sapiens
ESSFLSYRV

SEQ ID NO: 129715 - protein, 9 aa, Homo sapiens
SSFLSYRVE

SEQ ID NO: 129716 - protein, 9 aa, Homo sapiens
SFLSYRVEP

SEQ ID NO: 129717 - protein, 9 aa, Homo sapiens
FLSYRVEPL

SEQ ID NO: 129718 - protein, 9 aa, Homo sapiens
LSYRVEPLK

SEQ ID NO: 129719 - protein, 9 aa, Homo sapiens
SYRVEPLKS

SEQ ID NO: 129720 - protein, 9 aa, Homo sapiens
YRVEPLKSK

SEQ ID NO: 129721 - protein, 9 aa, Homo sapiens
RVEPLKSKT

SEQ ID NO: 129722 - protein, 9 aa, Homo sapiens
VEPLKSKTN

SEQ ID NO: 129723 - protein, 9 aa, Homo sapiens
EPLKSKTNF

SEQ ID NO: 129724 - protein, 9 aa, Homo sapiens
PLKSKTNFW

SEQ ID NO: 129725 - protein, 9 aa, Homo sapiens
LKSKTNFWI

SEQ ID NO: 129726 - protein, 9 aa, Homo sapiens
KSKTNFWIG

SEQ ID NO: 129727 - protein, 9 aa, Homo sapiens
SKTNFWIGL

SEQ ID NO: 129728 - protein, 9 aa, Homo sapiens
KTNFWIGLF

SEQ ID NO: 129729 - protein, 9 aa, Homo sapiens
TNFWIGLFR

SEQ ID NO: 129730 - protein, 9 aa, Homo sapiens
NFWIGLFRN

SEQ ID NO: 129731 - protein, 9 aa, Homo sapiens
FWIGLFRNV

SEQ ID NO: 129732 - protein, 9 aa, Homo sapiens
WIGLFRNVE

SEQ ID NO: 129733 - protein, 9 aa, Homo sapiens
IGLFRNVEG

SEQ ID NO: 129734 - protein, 9 aa, Homo sapiens
GLFRNVEGT

SEQ ID NO: 129735 - protein, 9 aa, Homo sapiens
LFRNVEGTW

SEQ ID NO: 129736 - protein, 9 aa, Homo sapiens
FRNVEGTWL

SEQ ID NO: 129737 - protein, 9 aa, Homo sapiens
RNVEGTWLW

SEQ ID NO: 129738 - protein, 9 aa, Homo sapiens
NVEGTWLWI

SEQ ID NO: 129739 - protein, 9 aa, Homo sapiens
VEGTWLWIN

SEQ ID NO: 129740 - protein, 9 aa, Homo sapiens
EGTWLWINN

SEQ ID NO: 129741 - protein, 9 aa, Homo sapiens
GTWLWINNS

SEQ ID NO: 129742 - protein, 9 aa, Homo sapiens
TWLWINNSP

SEQ ID NO: 129743 - protein, 9 aa, Homo sapiens
WLWINNSPV

SEQ ID NO: 129744 - protein, 9 aa, Homo sapiens
LWINNSPVS

SEQ ID NO: 129745 - protein, 9 aa, Homo sapiens
WINNSPVSF

SEQ ID NO: 129746 - protein, 9 aa, Homo sapiens
INNSPVSFV

SEQ ID NO: 129747 - protein, 9 aa, Homo sapiens
NNSPVSFVN

SEQ ID NO: 129748 - protein, 9 aa, Homo sapiens
NSPVSFVNW

SEQ ID NO: 129749 - protein, 9 aa, Homo sapiens
SPVSFVNWN

SEQ ID NO: 129750 - protein, 9 aa, Homo sapiens
PVSFVNWNT

SEQ ID NO: 129751 - protein, 9 aa, Homo sapiens
VSFVNWNTG

SEQ ID NO: 129752 - protein, 9 aa, Homo sapiens
SFVNWNTGD

SEQ ID NO: 129753 - protein, 9 aa, Homo sapiens
FVNWNTGDP

SEQ ID NO: 129754 - protein, 9 aa, Homo sapiens
VNWNTGDPS

SEQ ID NO: 129755 - protein, 9 aa, Homo sapiens
NWNTGDPSG

SEQ ID NO: 129756 - protein, 9 aa, Homo sapiens
WNTGDPSGE

SEQ ID NO: 129757 - protein, 9 aa, Homo sapiens
NTGDPSGER

SEQ ID NO: 129758 - protein, 9 aa, Homo sapiens
TGDPSGERN

SEQ ID NO: 129759 - protein, 9 aa, Homo sapiens
GDPSGERND

SEQ ID NO: 129760 - protein, 9 aa, Homo sapiens
DPSGERNDC

SEQ ID NO: 129761 - protein, 9 aa, Homo sapiens
PSGERNDCV

SEQ ID NO: 129762 - protein, 9 aa, Homo sapiens
SGERNDCVA

SEQ ID NO: 129763 - protein, 9 aa, Homo sapiens
GERNDCVAL

SEQ ID NO: 129764 - protein, 9 aa, Homo sapiens
ERNDCVALH

SEQ ID NO: 129765 - protein, 9 aa, Homo sapiens
RNDCVALHA

SEQ ID NO: 129766 - protein, 9 aa, Homo sapiens
NDCVALHAS

SEQ ID NO: 129767 - protein, 9 aa, Homo sapiens
DCVALHASS

SEQ ID NO: 129768 - protein, 9 aa, Homo sapiens
CVALHASSG

SEQ ID NO: 129769 - protein, 9 aa, Homo sapiens
VALHASSGF

SEQ ID NO: 129770 - protein, 9 aa, Homo sapiens
ALHASSGFW

SEQ ID NO: 129771 - protein, 9 aa, Homo sapiens
LHASSGFWS

SEQ ID NO: 129772 - protein, 9 aa, Homo sapiens
HASSGFWSN

SEQ ID NO: 129773 - protein, 9 aa, Homo sapiens
ASSGFWSNI

SEQ ID NO: 129774 - protein, 9 aa, Homo sapiens
SSGFWSNIH

SEQ ID NO: 129775 - protein, 9 aa, Homo sapiens
SGFWSNIHC

SEQ ID NO: 129776 - protein, 9 aa, Homo sapiens
GFWSNIHCS

SEQ ID NO: 129777 - protein, 9 aa, Homo sapiens
FWSNIHCSS

SEQ ID NO: 129778 - protein, 9 aa, Homo sapiens
WSNIHCSSY

SEQ ID NO: 129779 - protein, 9 aa, Homo sapiens
SNIHCSSYK

SEQ ID NO: 129780 - protein, 9 aa, Homo sapiens
NIHCSSYKG

SEQ ID NO: 129781 - protein, 9 aa, Homo sapiens
IHCSSYKGY

SEQ ID NO: 129782 - protein, 9 aa, Homo sapiens
HCSSYKGYI

SEQ ID NO: 129783 - protein, 9 aa, Homo sapiens
CSSYKGYIC

SEQ ID NO: 129784 - protein, 9 aa, Homo sapiens
SSYKGYICK

SEQ ID NO: 129785 - protein, 9 aa, Homo sapiens
SYKGYICKR

SEQ ID NO: 129786 - protein, 9 aa, Homo sapiens
YKGYICKRP

SEQ ID NO: 129787 - protein, 9 aa, Homo sapiens
KGYICKRPK

SEQ ID NO: 129788 - protein, 9 aa, Homo sapiens
GYICKRPKI

SEQ ID NO: 129789 - protein, 9 aa, Homo sapiens
YICKRPKII

SEQ ID NO: 129790 - protein, 9 aa, Homo sapiens
ICKRPKIID

SEQ ID NO: 129791 - protein, 9 aa, Homo sapiens
CKRPKIIDA

SEQ ID NO: 129792 - protein, 9 aa, Homo sapiens
KRPKIIDAK

SEQ ID NO: 129793 - protein, 9 aa, Homo sapiens
RPKIIDAKP

SEQ ID NO: 129794 - protein, 9 aa, Homo sapiens
PKIIDAKPT

SEQ ID NO: 129795 - protein, 9 aa, Homo sapiens
KIIDAKPTH

SEQ ID NO: 129796 - protein, 9 aa, Homo sapiens
IIDAKPTHE

SEQ ID NO: 129797 - protein, 9 aa, Homo sapiens
IDAKPTHEL

SEQ ID NO: 129798 - protein, 9 aa, Homo sapiens
DAKPTHELL

SEQ ID NO: 129799 - protein, 9 aa, Homo sapiens
AKPTHELLT

SEQ ID NO: 129800 - protein, 9 aa, Homo sapiens
KPTHELLTT

SEQ ID NO: 129801 - protein, 9 aa, Homo sapiens
PTHELLTTK

SEQ ID NO: 129802 - protein, 9 aa, Homo sapiens
THELLTTKA

SEQ ID NO: 129803 - protein, 9 aa, Homo sapiens
HELLTTKAD

SEQ ID NO: 129804 - protein, 9 aa, Homo sapiens
ELLTTKADT

SEQ ID NO: 129805 - protein, 9 aa, Homo sapiens
LLTTKADTR

SEQ ID NO: 129806 - protein, 9 aa, Homo sapiens
LTTKADTRK

SEQ ID NO: 129807 - protein, 9 aa, Homo sapiens
TTKADTRKM

SEQ ID NO: 129808 - protein, 9 aa, Homo sapiens
TKADTRKMD

SEQ ID NO: 129809 - protein, 9 aa, Homo sapiens
KADTRKMDP

SEQ ID NO: 129810 - protein, 9 aa, Homo sapiens
ADTRKMDPS

SEQ ID NO: 129811 - protein, 9 aa, Homo sapiens
DTRKMDPSK

SEQ ID NO: 129812 - protein, 9 aa, Homo sapiens
TRKMDPSKP

SEQ ID NO: 129813 - protein, 9 aa, Homo sapiens
RKMDPSKPS

SEQ ID NO: 129814 - protein, 9 aa, Homo sapiens
KMDPSKPSS

SEQ ID NO: 129815 - protein, 9 aa, Homo sapiens
MDPSKPSSN

SEQ ID NO: 129816 - protein, 9 aa, Homo sapiens
DPSKPSSNV

SEQ ID NO: 129817 - protein, 9 aa, Homo sapiens
PSKPSSNVA

SEQ ID NO: 129818 - protein, 9 aa, Homo sapiens
SKPSSNVAG

SEQ ID NO: 129819 - protein, 9 aa, Homo sapiens
KPSSNVAGV

SEQ ID NO: 129820 - protein, 9 aa, Homo sapiens
PSSNVAGVV

SEQ ID NO: 129821 - protein, 9 aa, Homo sapiens
SSNVAGVVI

SEQ ID NO: 129822 - protein, 9 aa, Homo sapiens
SNVAGVVII

SEQ ID NO: 129823 - protein, 9 aa, Homo sapiens
NVAGVVIIV

SEQ ID NO: 129824 - protein, 9 aa, Homo sapiens
VAGVVIIVI

SEQ ID NO: 129825 - protein, 9 aa, Homo sapiens
AGVVIIVIL

SEQ ID NO: 129826 - protein, 9 aa, Homo sapiens
GVVIIVILL

SEQ ID NO: 129827 - protein, 9 aa, Homo sapiens
VVIIVILLI

SEQ ID NO: 129828 - protein, 9 aa, Homo sapiens
VIIVILLIL

SEQ ID NO: 129829 - protein, 9 aa, Homo sapiens
IIVILLILT

SEQ ID NO: 129830 - protein, 9 aa, Homo sapiens
IVILLILTG

SEQ ID NO: 129831 - protein, 9 aa, Homo sapiens
VILLILTGA

SEQ ID NO: 129832 - protein, 9 aa, Homo sapiens
ILLILTGAG

SEQ ID NO: 129833 - protein, 9 aa, Homo sapiens
LLILTGAGL

SEQ ID NO: 129834 - protein, 9 aa, Homo sapiens
LILTGAGLA

SEQ ID NO: 129835 - protein, 9 aa, Homo sapiens
ILTGAGLAA

SEQ ID NO: 129836 - protein, 9 aa, Homo sapiens
LTGAGLAAY

SEQ ID NO: 129837 - protein, 9 aa, Homo sapiens
TGAGLAAYF

SEQ ID NO: 129838 - protein, 9 aa, Homo sapiens
GAGLAAYFF

SEQ ID NO: 129839 - protein, 9 aa, Homo sapiens
AGLAAYFFY

SEQ ID NO: 129840 - protein, 9 aa, Homo sapiens
GLAAYFFYK

SEQ ID NO: 129841 - protein, 9 aa, Homo sapiens
LAAYFFYKK

SEQ ID NO: 129842 - protein, 9 aa, Homo sapiens
AAYFFYKKR

SEQ ID NO: 129843 - protein, 9 aa, Homo sapiens
AYFFYKKRR

SEQ ID NO: 129844 - protein, 9 aa, Homo sapiens
YFFYKKRRV

SEQ ID NO: 129845 - protein, 9 aa, Homo sapiens
FFYKKRRVH

SEQ ID NO: 129846 - protein, 9 aa, Homo sapiens
FYKKRRVHL

SEQ ID NO: 129847 - protein, 9 aa, Homo sapiens
YKKRRVHLP

SEQ ID NO: 129848 - protein, 9 aa, Homo sapiens
KKRRVHLPQ

SEQ ID NO: 129849 - protein, 9 aa, Homo sapiens
KRRVHLPQE

SEQ ID NO: 129850 - protein, 9 aa, Homo sapiens
RRVHLPQEG

SEQ ID NO: 129851 - protein, 9 aa, Homo sapiens
RVHLPQEGA

SEQ ID NO: 129852 - protein, 9 aa, Homo sapiens
VHLPQEGAF

SEQ ID NO: 129853 - protein, 9 aa, Homo sapiens
HLPQEGAFE

SEQ ID NO: 129854 - protein, 9 aa, Homo sapiens
LPQEGAFEN

SEQ ID NO: 129855 - protein, 9 aa, Homo sapiens
PQEGAFENT

SEQ ID NO: 129856 - protein, 9 aa, Homo sapiens
QEGAFENTL

SEQ ID NO: 129857 - protein, 9 aa, Homo sapiens
EGAFENTLY

SEQ ID NO: 129858 - protein, 9 aa, Homo sapiens
GAFENTLYF

SEQ ID NO: 129859 - protein, 9 aa, Homo sapiens
AFENTLYFN

SEQ ID NO: 129860 - protein, 9 aa, Homo sapiens
FENTLYFNS

SEQ ID NO: 129861 - protein, 9 aa, Homo sapiens
ENTLYFNSQ

SEQ ID NO: 129862 - protein, 9 aa, Homo sapiens
NTLYFNSQS

SEQ ID NO: 129863 - protein, 9 aa, Homo sapiens
TLYFNSQSS

SEQ ID NO: 129864 - protein, 9 aa, Homo sapiens
LYFNSQSSP

SEQ ID NO: 129865 - protein, 9 aa, Homo sapiens
YFNSQSSPG

SEQ ID NO: 129866 - protein, 9 aa, Homo sapiens
FNSQSSPGT

SEQ ID NO: 129867 - protein, 9 aa, Homo sapiens
NSQSSPGTS

SEQ ID NO: 129868 - protein, 9 aa, Homo sapiens
SQSSPGTSD

SEQ ID NO: 129869 - protein, 9 aa, Homo sapiens
QSSPGTSDM

SEQ ID NO: 129870 - protein, 9 aa, Homo sapiens
SSPGTSDMK

SEQ ID NO: 129871 - protein, 9 aa, Homo sapiens
SPGTSDMKD

SEQ ID NO: 129872 - protein, 9 aa, Homo sapiens
PGTSDMKDL

SEQ ID NO: 129873 - protein, 9 aa, Homo sapiens
GTSDMKDLV

SEQ ID NO: 129874 - protein, 9 aa, Homo sapiens
TSDMKDLVG

SEQ ID NO: 129875 - protein, 9 aa, Homo sapiens
SDMKDLVGN

SEQ ID NO: 129876 - protein, 9 aa, Homo sapiens
DMKDLVGNI

SEQ ID NO: 129877 - protein, 9 aa, Homo sapiens
MKDLVGNIE

SEQ ID NO: 129878 - protein, 9 aa, Homo sapiens
KDLVGNIEQ

SEQ ID NO: 129879 - protein, 9 aa, Homo sapiens
DLVGNIEQN

SEQ ID NO: 129880 - protein, 9 aa, Homo sapiens
LVGNIEQNE

SEQ ID NO: 129881 - protein, 9 aa, Homo sapiens
VGNIEQNEH

SEQ ID NO: 129882 - protein, 9 aa, Homo sapiens
GNIEQNEHS

SEQ ID NO: 129883 - protein, 9 aa, Homo sapiens
NIEQNEHSV

SEQ ID NO: 129884 - protein, 9 aa, Homo sapiens
IEQNEHSVI

SEQ ID NO: 129885 - protein, 9 aa, Homo sapiens
MPREDAHFI

SEQ ID NO: 129886 - protein, 9 aa, Homo sapiens
PREDAHFIY

SEQ ID NO: 129887 - protein, 9 aa, Homo sapiens
REDAHFIYG

SEQ ID NO: 129888 - protein, 9 aa, Homo sapiens
EDAHFIYGY

SEQ ID NO: 129889 - protein, 9 aa, Homo sapiens
DAHFIYGYP

SEQ ID NO: 129890 - protein, 9 aa, Homo sapiens
AHFIYGYPK

SEQ ID NO: 129891 - protein, 9 aa, Homo sapiens
HFIYGYPKK

SEQ ID NO: 129892 - protein, 9 aa, Homo sapiens
FIYGYPKKG

SEQ ID NO: 129893 - protein, 9 aa, Homo sapiens
IYGYPKKGH

SEQ ID NO: 129894 - protein, 9 aa, Homo sapiens
YGYPKKGHG

SEQ ID NO: 129895 - protein, 9 aa, Homo sapiens
GYPKKGHGH

SEQ ID NO: 129896 - protein, 9 aa, Homo sapiens
YPKKGHGHS

SEQ ID NO: 129897 - protein, 9 aa, Homo sapiens
PKKGHGHSY

SEQ ID NO: 129898 - protein, 9 aa, Homo sapiens
KKGHGHSYT

SEQ ID NO: 129899 - protein, 9 aa, Homo sapiens
KGHGHSYTT

SEQ ID NO: 129900 - protein, 9 aa, Homo sapiens
GHGHSYTTA

SEQ ID NO: 129901 - protein, 9 aa, Homo sapiens
HGHSYTTAE

SEQ ID NO: 129902 - protein, 9 aa, Homo sapiens
GHSYTTAEE

SEQ ID NO: 129903 - protein, 9 aa, Homo sapiens
HSYTTAEEA

SEQ ID NO: 129904 - protein, 9 aa, Homo sapiens
SYTTAEEAA

SEQ ID NO: 129905 - protein, 9 aa, Homo sapiens
YTTAEEAAG

SEQ ID NO: 129906 - protein, 9 aa, Homo sapiens
TTAEEAAGI

SEQ ID NO: 129907 - protein, 9 aa, Homo sapiens
TAEEAAGIG

SEQ ID NO: 129908 - protein, 9 aa, Homo sapiens
AEEAAGIGI

SEQ ID NO: 129909 - protein, 9 aa, Homo sapiens
EEAAGIGIL

SEQ ID NO: 129910 - protein, 9 aa, Homo sapiens
EAAGIGILT

SEQ ID NO: 129911 - protein, 9 aa, Homo sapiens
AAGIGILTV

SEQ ID NO: 129912 - protein, 9 aa, Homo sapiens
AGIGILTVI

SEQ ID NO: 129913 - protein, 9 aa, Homo sapiens
GIGILTVIL

SEQ ID NO: 129914 - protein, 9 aa, Homo sapiens
IGILTVILG

SEQ ID NO: 129915 - protein, 9 aa, Homo sapiens
GILTVILGV

SEQ ID NO: 129916 - protein, 9 aa, Homo sapiens
ILTVILGVL

SEQ ID NO: 129917 - protein, 9 aa, Homo sapiens
LTVILGVLL

SEQ ID NO: 129918 - protein, 9 aa, Homo sapiens
TVILGVLLL

SEQ ID NO: 129919 - protein, 9 aa, Homo sapiens
VILGVLLLI

SEQ ID NO: 129920 - protein, 9 aa, Homo sapiens
ILGVLLLIG

SEQ ID NO: 129921 - protein, 9 aa, Homo sapiens
LGVLLLIGC

SEQ ID NO: 129922 - protein, 9 aa, Homo sapiens
GVLLLIGCW

SEQ ID NO: 129923 - protein, 9 aa, Homo sapiens
VLLLIGCWY

SEQ ID NO: 129924 - protein, 9 aa, Homo sapiens
LLLIGCWYC

SEQ ID NO: 129925 - protein, 9 aa, Homo sapiens
LLIGCWYCR

SEQ ID NO: 129926 - protein, 9 aa, Homo sapiens
LIGCWYCRR

SEQ ID NO: 129927 - protein, 9 aa, Homo sapiens
IGCWYCRRR

SEQ ID NO: 129928 - protein, 9 aa, Homo sapiens
GCWYCRRRN

SEQ ID NO: 129929 - protein, 9 aa, Homo sapiens
CWYCRRRNG

SEQ ID NO: 129930 - protein, 9 aa, Homo sapiens
WYCRRRNGY

SEQ ID NO: 129931 - protein, 9 aa, Homo sapiens
YCRRRNGYR

SEQ ID NO: 129932 - protein, 9 aa, Homo sapiens
CRRRNGYRA

SEQ ID NO: 129933 - protein, 9 aa, Homo sapiens
RRRNGYRAL

SEQ ID NO: 129934 - protein, 9 aa, Homo sapiens
RRNGYRALM

SEQ ID NO: 129935 - protein, 9 aa, Homo sapiens
RNGYRALMD

SEQ ID NO: 129936 - protein, 9 aa, Homo sapiens
NGYRALMDK

SEQ ID NO: 129937 - protein, 9 aa, Homo sapiens
GYRALMDKS

SEQ ID NO: 129938 - protein, 9 aa, Homo sapiens
YRALMDKSL

SEQ ID NO: 129939 - protein, 9 aa, Homo sapiens
RALMDKSLH

SEQ ID NO: 129940 - protein, 9 aa, Homo sapiens
ALMDKSLHV

SEQ ID NO: 129941 - protein, 9 aa, Homo sapiens
LMDKSLHVG

SEQ ID NO: 129942 - protein, 9 aa, Homo sapiens
MDKSLHVGT

SEQ ID NO: 129943 - protein, 9 aa, Homo sapiens
DKSLHVGTQ

SEQ ID NO: 129944 - protein, 9 aa, Homo sapiens
KSLHVGTQC

SEQ ID NO: 129945 - protein, 9 aa, Homo sapiens
SLHVGTQCA

SEQ ID NO: 129946 - protein, 9 aa, Homo sapiens
LHVGTQCAL

SEQ ID NO: 129947 - protein, 9 aa, Homo sapiens
HVGTQCALT

SEQ ID NO: 129948 - protein, 9 aa, Homo sapiens
VGTQCALTR

SEQ ID NO: 129949 - protein, 9 aa, Homo sapiens
GTQCALTRR

SEQ ID NO: 129950 - protein, 9 aa, Homo sapiens
TQCALTRRC

SEQ ID NO: 129951 - protein, 9 aa, Homo sapiens
QCALTRRCP

SEQ ID NO: 129952 - protein, 9 aa, Homo sapiens
CALTRRCPQ

SEQ ID NO: 129953 - protein, 9 aa, Homo sapiens
ALTRRCPQE

SEQ ID NO: 129954 - protein, 9 aa, Homo sapiens
LTRRCPQEG

SEQ ID NO: 129955 - protein, 9 aa, Homo sapiens
TRRCPQEGF

SEQ ID NO: 129956 - protein, 9 aa, Homo sapiens
RRCPQEGFD

SEQ ID NO: 129957 - protein, 9 aa, Homo sapiens
RCPQEGFDH

SEQ ID NO: 129958 - protein, 9 aa, Homo sapiens
CPQEGFDHR

SEQ ID NO: 129959 - protein, 9 aa, Homo sapiens
PQEGFDHRD

SEQ ID NO: 129960 - protein, 9 aa, Homo sapiens
QEGFDHRDS

SEQ ID NO: 129961 - protein, 9 aa, Homo sapiens
EGFDHRDSK

SEQ ID NO: 129962 - protein, 9 aa, Homo sapiens
GFDHRDSKV

SEQ ID NO: 129963 - protein, 9 aa, Homo sapiens
FDHRDSKVS

SEQ ID NO: 129964 - protein, 9 aa, Homo sapiens
DHRDSKVSL

SEQ ID NO: 129965 - protein, 9 aa, Homo sapiens
HRDSKVSLQ

SEQ ID NO: 129966 - protein, 9 aa, Homo sapiens
RDSKVSLQE

SEQ ID NO: 129967 - protein, 9 aa, Homo sapiens
DSKVSLQEK

SEQ ID NO: 129968 - protein, 9 aa, Homo sapiens
SKVSLQEKN

SEQ ID NO: 129969 - protein, 9 aa, Homo sapiens
KVSLQEKNC

SEQ ID NO: 129970 - protein, 9 aa, Homo sapiens
VSLQEKNCE

SEQ ID NO: 129971 - protein, 9 aa, Homo sapiens
SLQEKNCEP

SEQ ID NO: 129972 - protein, 9 aa, Homo sapiens
LQEKNCEPV

SEQ ID NO: 129973 - protein, 9 aa, Homo sapiens
QEKNCEPVV

SEQ ID NO: 129974 - protein, 9 aa, Homo sapiens
EKNCEPVVP

SEQ ID NO: 129975 - protein, 9 aa, Homo sapiens
KNCEPVVPN

SEQ ID NO: 129976 - protein, 9 aa, Homo sapiens
NCEPVVPNA

SEQ ID NO: 129977 - protein, 9 aa, Homo sapiens
CEPVVPNAP

SEQ ID NO: 129978 - protein, 9 aa, Homo sapiens
EPVVPNAPP

SEQ ID NO: 129979 - protein, 9 aa, Homo sapiens
PVVPNAPPA

SEQ ID NO: 129980 - protein, 9 aa, Homo sapiens
VVPNAPPAY

SEQ ID NO: 129981 - protein, 9 aa, Homo sapiens
VPNAPPAYE

SEQ ID NO: 129982 - protein, 9 aa, Homo sapiens
PNAPPAYEK

SEQ ID NO: 129983 - protein, 9 aa, Homo sapiens
NAPPAYEKL

SEQ ID NO: 129984 - protein, 9 aa, Homo sapiens
APPAYEKLS

SEQ ID NO: 129985 - protein, 9 aa, Homo sapiens
PPAYEKLSA

SEQ ID NO: 129986 - protein, 9 aa, Homo sapiens
PAYEKLSAE

SEQ ID NO: 129987 - protein, 9 aa, Homo sapiens
AYEKLSAEQ

SEQ ID NO: 129988 - protein, 9 aa, Homo sapiens
YEKLSAEQS

SEQ ID NO: 129989 - protein, 9 aa, Homo sapiens
EKLSAEQSP

SEQ ID NO: 129990 - protein, 9 aa, Homo sapiens
KLSAEQSPP

SEQ ID NO: 129991 - protein, 9 aa, Homo sapiens
LSAEQSPPP

SEQ ID NO: 129992 - protein, 9 aa, Homo sapiens
SAEQSPPPY

SEQ ID NO: 129993 - protein, 9 aa, Homo sapiens
AEQSPPPYS

SEQ ID NO: 129994 - protein, 9 aa, Homo sapiens
EQSPPPYSP

SEQ ID NO: 129995 - protein, 9 aa, Homo sapiens
MPREDAHFI

SEQ ID NO: 129996 - protein, 9 aa, Homo sapiens
PREDAHFIY

SEQ ID NO: 129997 - protein, 9 aa, Homo sapiens
REDAHFIYG

SEQ ID NO: 129998 - protein, 9 aa, Homo sapiens
EDAHFIYGY

SEQ ID NO: 129999 - protein, 9 aa, Homo sapiens
DAHFIYGYP

SEQ ID NO: 130000 - protein, 9 aa, Homo sapiens
AHFIYGYPK

SEQ ID NO: 130001 - protein, 9 aa, Homo sapiens
HFIYGYPKK

SEQ ID NO: 130002 - protein, 9 aa, Homo sapiens
FIYGYPKKG

SEQ ID NO: 130003 - protein, 9 aa, Homo sapiens
IYGYPKKGH

SEQ ID NO: 130004 - protein, 9 aa, Homo sapiens
YGYPKKGHG

SEQ ID NO: 130005 - protein, 9 aa, Homo sapiens
GYPKKGHGH

SEQ ID NO: 130006 - protein, 9 aa, Homo sapiens
YPKKGHGHS

SEQ ID NO: 130007 - protein, 9 aa, Homo sapiens
PKKGHGHSY

SEQ ID NO: 130008 - protein, 9 aa, Homo sapiens
KKGHGHSYT

SEQ ID NO: 130009 - protein, 9 aa, Homo sapiens
KGHGHSYTT

SEQ ID NO: 130010 - protein, 9 aa, Homo sapiens
GHGHSYTTA

SEQ ID NO: 130011 - protein, 9 aa, Homo sapiens
HGHSYTTAE

SEQ ID NO: 130012 - protein, 9 aa, Homo sapiens
GHSYTTAEE

SEQ ID NO: 130013 - protein, 9 aa, Homo sapiens
HSYTTAEEA

SEQ ID NO: 130014 - protein, 9 aa, Homo sapiens
SYTTAEEAA

SEQ ID NO: 130015 - protein, 9 aa, Homo sapiens
YTTAEEAAG

SEQ ID NO: 130016 - protein, 9 aa, Homo sapiens
TTAEEAAGI

SEQ ID NO: 130017 - protein, 9 aa, Homo sapiens
TAEEAAGIG

SEQ ID NO: 130018 - protein, 9 aa, Homo sapiens
AEEAAGIGI

SEQ ID NO: 130019 - protein, 9 aa, Homo sapiens
EEAAGIGIL

SEQ ID NO: 130020 - protein, 9 aa, Homo sapiens
EAAGIGILT

SEQ ID NO: 130021 - protein, 9 aa, Homo sapiens
AAGIGILTV

SEQ ID NO: 130022 - protein, 9 aa, Homo sapiens
AGIGILTVI

SEQ ID NO: 130023 - protein, 9 aa, Homo sapiens
GIGILTVIL

SEQ ID NO: 130024 - protein, 9 aa, Homo sapiens
IGILTVILG

SEQ ID NO: 130025 - protein, 9 aa, Homo sapiens
GILTVILGV

SEQ ID NO: 130026 - protein, 9 aa, Homo sapiens
ILTVILGVL

SEQ ID NO: 130027 - protein, 9 aa, Homo sapiens
LTVILGVLL

SEQ ID NO: 130028 - protein, 9 aa, Homo sapiens
TVILGVLLL

SEQ ID NO: 130029 - protein, 9 aa, Homo sapiens
VILGVLLLI

SEQ ID NO: 130030 - protein, 9 aa, Homo sapiens
ILGVLLLIG

SEQ ID NO: 130031 - protein, 9 aa, Homo sapiens
LGVLLLIGC

SEQ ID NO: 130032 - protein, 9 aa, Homo sapiens
GVLLLIGCW

SEQ ID NO: 130033 - protein, 9 aa, Homo sapiens
VLLLIGCWY

SEQ ID NO: 130034 - protein, 9 aa, Homo sapiens
LLLIGCWYC

SEQ ID NO: 130035 - protein, 9 aa, Homo sapiens
LLIGCWYCR

SEQ ID NO: 130036 - protein, 9 aa, Homo sapiens
LIGCWYCRR

SEQ ID NO: 130037 - protein, 9 aa, Homo sapiens
IGCWYCRRR

SEQ ID NO: 130038 - protein, 9 aa, Homo sapiens
GCWYCRRRN

SEQ ID NO: 130039 - protein, 9 aa, Homo sapiens
CWYCRRRNG

SEQ ID NO: 130040 - protein, 9 aa, Homo sapiens
WYCRRRNGY

SEQ ID NO: 130041 - protein, 9 aa, Homo sapiens
YCRRRNGYR

SEQ ID NO: 130042 - protein, 9 aa, Homo sapiens
CRRRNGYRA

SEQ ID NO: 130043 - protein, 9 aa, Homo sapiens
RRRNGYRAL

SEQ ID NO: 130044 - protein, 9 aa, Homo sapiens
RRNGYRALM

SEQ ID NO: 130045 - protein, 9 aa, Homo sapiens
RNGYRALMD

SEQ ID NO: 130046 - protein, 9 aa, Homo sapiens
NGYRALMDK

SEQ ID NO: 130047 - protein, 9 aa, Homo sapiens
GYRALMDKS

SEQ ID NO: 130048 - protein, 9 aa, Homo sapiens
YRALMDKSL

SEQ ID NO: 130049 - protein, 9 aa, Homo sapiens
RALMDKSLH

SEQ ID NO: 130050 - protein, 9 aa, Homo sapiens
ALMDKSLHV

SEQ ID NO: 130051 - protein, 9 aa, Homo sapiens
LMDKSLHVG

SEQ ID NO: 130052 - protein, 9 aa, Homo sapiens
MDKSLHVGT

SEQ ID NO: 130053 - protein, 9 aa, Homo sapiens
DKSLHVGTQ

SEQ ID NO: 130054 - protein, 9 aa, Homo sapiens
KSLHVGTQC

SEQ ID NO: 130055 - protein, 9 aa, Homo sapiens
SLHVGTQCA

SEQ ID NO: 130056 - protein, 9 aa, Homo sapiens
LHVGTQCAL

SEQ ID NO: 130057 - protein, 9 aa, Homo sapiens
HVGTQCALT

SEQ ID NO: 130058 - protein, 9 aa, Homo sapiens
VGTQCALTR

SEQ ID NO: 130059 - protein, 9 aa, Homo sapiens
GTQCALTRR

SEQ ID NO: 130060 - protein, 9 aa, Homo sapiens
TQCALTRRC

SEQ ID NO: 130061 - protein, 9 aa, Homo sapiens
QCALTRRCP

SEQ ID NO: 130062 - protein, 9 aa, Homo sapiens
CALTRRCPQ

SEQ ID NO: 130063 - protein, 9 aa, Homo sapiens
ALTRRCPQE

SEQ ID NO: 130064 - protein, 9 aa, Homo sapiens
LTRRCPQEG

SEQ ID NO: 130065 - protein, 9 aa, Homo sapiens
TRRCPQEGF

SEQ ID NO: 130066 - protein, 9 aa, Homo sapiens
RRCPQEGFD

SEQ ID NO: 130067 - protein, 9 aa, Homo sapiens
RCPQEGFDH

SEQ ID NO: 130068 - protein, 9 aa, Homo sapiens
CPQEGFDHR

SEQ ID NO: 130069 - protein, 9 aa, Homo sapiens
PQEGFDHRD

SEQ ID NO: 130070 - protein, 9 aa, Homo sapiens
QEGFDHRDS

SEQ ID NO: 130071 - protein, 9 aa, Homo sapiens
EGFDHRDSK

SEQ ID NO: 130072 - protein, 9 aa, Homo sapiens
GFDHRDSKV

SEQ ID NO: 130073 - protein, 9 aa, Homo sapiens
FDHRDSKVS

SEQ ID NO: 130074 - protein, 9 aa, Homo sapiens
DHRDSKVSL

SEQ ID NO: 130075 - protein, 9 aa, Homo sapiens
HRDSKVSLQ

SEQ ID NO: 130076 - protein, 9 aa, Homo sapiens
RDSKVSLQE

SEQ ID NO: 130077 - protein, 9 aa, Homo sapiens
DSKVSLQEK

SEQ ID NO: 130078 - protein, 9 aa, Homo sapiens
SKVSLQEKN

SEQ ID NO: 130079 - protein, 9 aa, Homo sapiens
KVSLQEKNC

SEQ ID NO: 130080 - protein, 9 aa, Homo sapiens
VSLQEKNCE

SEQ ID NO: 130081 - protein, 9 aa, Homo sapiens
SLQEKNCEP

SEQ ID NO: 130082 - protein, 9 aa, Homo sapiens
LQEKNCEPV

SEQ ID NO: 130083 - protein, 9 aa, Homo sapiens
QEKNCEPVV

SEQ ID NO: 130084 - protein, 9 aa, Homo sapiens
EKNCEPVVP

SEQ ID NO: 130085 - protein, 9 aa, Homo sapiens
KNCEPVVPN

SEQ ID NO: 130086 - protein, 9 aa, Homo sapiens
NCEPVVPNA

SEQ ID NO: 130087 - protein, 9 aa, Homo sapiens
CEPVVPNAP

SEQ ID NO: 130088 - protein, 9 aa, Homo sapiens
EPVVPNAPP

SEQ ID NO: 130089 - protein, 9 aa, Homo sapiens
PVVPNAPPA

SEQ ID NO: 130090 - protein, 9 aa, Homo sapiens
VVPNAPPAY

SEQ ID NO: 130091 - protein, 9 aa, Homo sapiens
VPNAPPAYE

SEQ ID NO: 130092 - protein, 9 aa, Homo sapiens
PNAPPAYEK

SEQ ID NO: 130093 - protein, 9 aa, Homo sapiens
NAPPAYEKL

SEQ ID NO: 130094 - protein, 9 aa, Homo sapiens
APPAYEKLS

SEQ ID NO: 130095 - protein, 9 aa, Homo sapiens
PPAYEKLSA

SEQ ID NO: 130096 - protein, 9 aa, Homo sapiens
PAYEKLSAE

SEQ ID NO: 130097 - protein, 9 aa, Homo sapiens
AYEKLSAEQ

SEQ ID NO: 130098 - protein, 9 aa, Homo sapiens
YEKLSAEQS

SEQ ID NO: 130099 - protein, 9 aa, Homo sapiens
EKLSAEQSP

SEQ ID NO: 130100 - protein, 9 aa, Homo sapiens
KLSAEQSPP

SEQ ID NO: 130101 - protein, 9 aa, Homo sapiens
LSAEQSPPP

SEQ ID NO: 130102 - protein, 9 aa, Homo sapiens
SAEQSPPPY

SEQ ID NO: 130103 - protein, 9 aa, Homo sapiens
AEQSPPPYS

SEQ ID NO: 130104 - protein, 9 aa, Homo sapiens
EQSPPPYSP

SEQ ID NO: 130105 - protein, 9 aa, Homo sapiens
MTPGTQSPF

SEQ ID NO: 130106 - protein, 9 aa, Homo sapiens
TPGTQSPFF

SEQ ID NO: 130107 - protein, 9 aa, Homo sapiens
PGTQSPFFL

SEQ ID NO: 130108 - protein, 9 aa, Homo sapiens
GTQSPFFLL

SEQ ID NO: 130109 - protein, 9 aa, Homo sapiens
TQSPFFLLL

SEQ ID NO: 130110 - protein, 9 aa, Homo sapiens
QSPFFLLLL

SEQ ID NO: 130111 - protein, 9 aa, Homo sapiens
SPFFLLLLL

SEQ ID NO: 130112 - protein, 9 aa, Homo sapiens
PFFLLLLLT

SEQ ID NO: 130113 - protein, 9 aa, Homo sapiens
FFLLLLLTV

SEQ ID NO: 130114 - protein, 9 aa, Homo sapiens
FLLLLLTVL

SEQ ID NO: 130115 - protein, 9 aa, Homo sapiens
LLLLLTVLT

SEQ ID NO: 130116 - protein, 9 aa, Homo sapiens
LLLLTVLTV

SEQ ID NO: 130117 - protein, 9 aa, Homo sapiens
LLLTVLTVV

SEQ ID NO: 130118 - protein, 9 aa, Homo sapiens
LLTVLTVVT

SEQ ID NO: 130119 - protein, 9 aa, Homo sapiens
LTVLTVVTG

SEQ ID NO: 130120 - protein, 9 aa, Homo sapiens
TVLTVVTGS

SEQ ID NO: 130121 - protein, 9 aa, Homo sapiens
VLTVVTGSG

SEQ ID NO: 130122 - protein, 9 aa, Homo sapiens
LTVVTGSGH

SEQ ID NO: 130123 - protein, 9 aa, Homo sapiens
TVVTGSGHA

SEQ ID NO: 130124 - protein, 9 aa, Homo sapiens
VVTGSGHAS

SEQ ID NO: 130125 - protein, 9 aa, Homo sapiens
VTGSGHASS

SEQ ID NO: 130126 - protein, 9 aa, Homo sapiens
TGSGHASST

SEQ ID NO: 130127 - protein, 9 aa, Homo sapiens
GSGHASSTP

SEQ ID NO: 130128 - protein, 9 aa, Homo sapiens
SGHASSTPG

SEQ ID NO: 130129 - protein, 9 aa, Homo sapiens
GHASSTPGG

SEQ ID NO: 130130 - protein, 9 aa, Homo sapiens
HASSTPGGE

SEQ ID NO: 130131 - protein, 9 aa, Homo sapiens
ASSTPGGEK

SEQ ID NO: 130132 - protein, 9 aa, Homo sapiens
SSTPGGEKE

SEQ ID NO: 130133 - protein, 9 aa, Homo sapiens
STPGGEKET

SEQ ID NO: 130134 - protein, 9 aa, Homo sapiens
TPGGEKETS

SEQ ID NO: 130135 - protein, 9 aa, Homo sapiens
PGGEKETSA

SEQ ID NO: 130136 - protein, 9 aa, Homo sapiens
GGEKETSAT

SEQ ID NO: 130137 - protein, 9 aa, Homo sapiens
GEKETSATQ

SEQ ID NO: 130138 - protein, 9 aa, Homo sapiens
EKETSATQR

SEQ ID NO: 130139 - protein, 9 aa, Homo sapiens
KETSATQRS

SEQ ID NO: 130140 - protein, 9 aa, Homo sapiens
ETSATQRSS

SEQ ID NO: 130141 - protein, 9 aa, Homo sapiens
TSATQRSSV

SEQ ID NO: 130142 - protein, 9 aa, Homo sapiens
SATQRSSVP

SEQ ID NO: 130143 - protein, 9 aa, Homo sapiens
ATQRSSVPS

SEQ ID NO: 130144 - protein, 9 aa, Homo sapiens
TQRSSVPSS

SEQ ID NO: 130145 - protein, 9 aa, Homo sapiens
QRSSVPSST

SEQ ID NO: 130146 - protein, 9 aa, Homo sapiens
RSSVPSSTE

SEQ ID NO: 130147 - protein, 9 aa, Homo sapiens
SSVPSSTEK

SEQ ID NO: 130148 - protein, 9 aa, Homo sapiens
SVPSSTEKN

SEQ ID NO: 130149 - protein, 9 aa, Homo sapiens
VPSSTEKNA

SEQ ID NO: 130150 - protein, 9 aa, Homo sapiens
PSSTEKNAV

SEQ ID NO: 130151 - protein, 9 aa, Homo sapiens
SSTEKNAVS

SEQ ID NO: 130152 - protein, 9 aa, Homo sapiens
STEKNAVSM

SEQ ID NO: 130153 - protein, 9 aa, Homo sapiens
TEKNAVSMT

SEQ ID NO: 130154 - protein, 9 aa, Homo sapiens
EKNAVSMTS

SEQ ID NO: 130155 - protein, 9 aa, Homo sapiens
KNAVSMTSS

SEQ ID NO: 130156 - protein, 9 aa, Homo sapiens
NAVSMTSSV

SEQ ID NO: 130157 - protein, 9 aa, Homo sapiens
AVSMTSSVL

SEQ ID NO: 130158 - protein, 9 aa, Homo sapiens
VSMTSSVLS

SEQ ID NO: 130159 - protein, 9 aa, Homo sapiens
SMTSSVLSS

SEQ ID NO: 130160 - protein, 9 aa, Homo sapiens
MTSSVLSSH

SEQ ID NO: 130161 - protein, 9 aa, Homo sapiens
TSSVLSSHS

SEQ ID NO: 130162 - protein, 9 aa, Homo sapiens
SSVLSSHSP

SEQ ID NO: 130163 - protein, 9 aa, Homo sapiens
SVLSSHSPG

SEQ ID NO: 130164 - protein, 9 aa, Homo sapiens
VLSSHSPGS

SEQ ID NO: 130165 - protein, 9 aa, Homo sapiens
LSSHSPGSG

SEQ ID NO: 130166 - protein, 9 aa, Homo sapiens
SSHSPGSGS

SEQ ID NO: 130167 - protein, 9 aa, Homo sapiens
SHSPGSGSS

SEQ ID NO: 130168 - protein, 9 aa, Homo sapiens
HSPGSGSST

SEQ ID NO: 130169 - protein, 9 aa, Homo sapiens
SPGSGSSTT

SEQ ID NO: 130170 - protein, 9 aa, Homo sapiens
PGSGSSTTQ

SEQ ID NO: 130171 - protein, 9 aa, Homo sapiens
GSGSSTTQG

SEQ ID NO: 130172 - protein, 9 aa, Homo sapiens
SGSSTTQGQ

SEQ ID NO: 130173 - protein, 9 aa, Homo sapiens
GSSTTQGQD

SEQ ID NO: 130174 - protein, 9 aa, Homo sapiens
SSTTQGQDV

SEQ ID NO: 130175 - protein, 9 aa, Homo sapiens
STTQGQDVT

SEQ ID NO: 130176 - protein, 9 aa, Homo sapiens
TTQGQDVTL

SEQ ID NO: 130177 - protein, 9 aa, Homo sapiens
TQGQDVTLA

SEQ ID NO: 130178 - protein, 9 aa, Homo sapiens
QGQDVTLAP

SEQ ID NO: 130179 - protein, 9 aa, Homo sapiens
GQDVTLAPA

SEQ ID NO: 130180 - protein, 9 aa, Homo sapiens
QDVTLAPAT

SEQ ID NO: 130181 - protein, 9 aa, Homo sapiens
DVTLAPATE

SEQ ID NO: 130182 - protein, 9 aa, Homo sapiens
VTLAPATEP

SEQ ID NO: 130183 - protein, 9 aa, Homo sapiens
TLAPATEPA

SEQ ID NO: 130184 - protein, 9 aa, Homo sapiens
LAPATEPAS

SEQ ID NO: 130185 - protein, 9 aa, Homo sapiens
APATEPASG

SEQ ID NO: 130186 - protein, 9 aa, Homo sapiens
PATEPASGS

SEQ ID NO: 130187 - protein, 9 aa, Homo sapiens
ATEPASGSA

SEQ ID NO: 130188 - protein, 9 aa, Homo sapiens
TEPASGSAA

SEQ ID NO: 130189 - protein, 9 aa, Homo sapiens
EPASGSAAT

SEQ ID NO: 130190 - protein, 9 aa, Homo sapiens
PASGSAATW

SEQ ID NO: 130191 - protein, 9 aa, Homo sapiens
ASGSAATWG

SEQ ID NO: 130192 - protein, 9 aa, Homo sapiens
SGSAATWGQ

SEQ ID NO: 130193 - protein, 9 aa, Homo sapiens
GSAATWGQD

SEQ ID NO: 130194 - protein, 9 aa, Homo sapiens
SAATWGQDV

SEQ ID NO: 130195 - protein, 9 aa, Homo sapiens
AATWGQDVT

SEQ ID NO: 130196 - protein, 9 aa, Homo sapiens
ATWGQDVTS

SEQ ID NO: 130197 - protein, 9 aa, Homo sapiens
TWGQDVTSV

SEQ ID NO: 130198 - protein, 9 aa, Homo sapiens
WGQDVTSVP

SEQ ID NO: 130199 - protein, 9 aa, Homo sapiens
GQDVTSVPV

SEQ ID NO: 130200 - protein, 9 aa, Homo sapiens
QDVTSVPVT

SEQ ID NO: 130201 - protein, 9 aa, Homo sapiens
DVTSVPVTR

SEQ ID NO: 130202 - protein, 9 aa, Homo sapiens
VTSVPVTRP

SEQ ID NO: 130203 - protein, 9 aa, Homo sapiens
TSVPVTRPA

SEQ ID NO: 130204 - protein, 9 aa, Homo sapiens
SVPVTRPAL

SEQ ID NO: 130205 - protein, 9 aa, Homo sapiens
VPVTRPALG

SEQ ID NO: 130206 - protein, 9 aa, Homo sapiens
PVTRPALGS

SEQ ID NO: 130207 - protein, 9 aa, Homo sapiens
VTRPALGST

SEQ ID NO: 130208 - protein, 9 aa, Homo sapiens
TRPALGSTT

SEQ ID NO: 130209 - protein, 9 aa, Homo sapiens
RPALGSTTP

SEQ ID NO: 130210 - protein, 9 aa, Homo sapiens
PALGSTTPP

SEQ ID NO: 130211 - protein, 9 aa, Homo sapiens
ALGSTTPPA

SEQ ID NO: 130212 - protein, 9 aa, Homo sapiens
LGSTTPPAH

SEQ ID NO: 130213 - protein, 9 aa, Homo sapiens
GSTTPPAHD

SEQ ID NO: 130214 - protein, 9 aa, Homo sapiens
STTPPAHDV

SEQ ID NO: 130215 - protein, 9 aa, Homo sapiens
TTPPAHDVT

SEQ ID NO: 130216 - protein, 9 aa, Homo sapiens
TPPAHDVTS

SEQ ID NO: 130217 - protein, 9 aa, Homo sapiens
PPAHDVTSA

SEQ ID NO: 130218 - protein, 9 aa, Homo sapiens
PAHDVTSAP

SEQ ID NO: 130219 - protein, 9 aa, Homo sapiens
AHDVTSAPD

SEQ ID NO: 130220 - protein, 9 aa, Homo sapiens
HDVTSAPDN

SEQ ID NO: 130221 - protein, 9 aa, Homo sapiens
DVTSAPDNK

SEQ ID NO: 130222 - protein, 9 aa, Homo sapiens
VTSAPDNKP

SEQ ID NO: 130223 - protein, 9 aa, Homo sapiens
TSAPDNKPA

SEQ ID NO: 130224 - protein, 9 aa, Homo sapiens
SAPDNKPAP

SEQ ID NO: 130225 - protein, 9 aa, Homo sapiens
APDNKPAPG

SEQ ID NO: 130226 - protein, 9 aa, Homo sapiens
PDNKPAPGS

SEQ ID NO: 130227 - protein, 9 aa, Homo sapiens
DNKPAPGST

SEQ ID NO: 130228 - protein, 9 aa, Homo sapiens
NKPAPGSTA

SEQ ID NO: 130229 - protein, 9 aa, Homo sapiens
KPAPGSTAP

SEQ ID NO: 130230 - protein, 9 aa, Homo sapiens
PAPGSTAPP

SEQ ID NO: 130231 - protein, 9 aa, Homo sapiens
APGSTAPPA

SEQ ID NO: 130232 - protein, 9 aa, Homo sapiens
PGSTAPPAH

SEQ ID NO: 130233 - protein, 9 aa, Homo sapiens
GSTAPPAHG

SEQ ID NO: 130234 - protein, 9 aa, Homo sapiens
STAPPAHGV

SEQ ID NO: 130235 - protein, 9 aa, Homo sapiens
TAPPAHGVT

SEQ ID NO: 130236 - protein, 9 aa, Homo sapiens
APPAHGVTS

SEQ ID NO: 130237 - protein, 9 aa, Homo sapiens
PPAHGVTSA

SEQ ID NO: 130238 - protein, 9 aa, Homo sapiens
PAHGVTSAP

SEQ ID NO: 130239 - protein, 9 aa, Homo sapiens
AHGVTSAPD

SEQ ID NO: 130240 - protein, 9 aa, Homo sapiens
HGVTSAPDT

SEQ ID NO: 130241 - protein, 9 aa, Homo sapiens
GVTSAPDTR

SEQ ID NO: 130242 - protein, 9 aa, Homo sapiens
VTSAPDTRP

SEQ ID NO: 130243 - protein, 9 aa, Homo sapiens
TSAPDTRPA

SEQ ID NO: 130244 - protein, 9 aa, Homo sapiens
SAPDTRPAP

SEQ ID NO: 130245 - protein, 9 aa, Homo sapiens
APDTRPAPG

SEQ ID NO: 130246 - protein, 9 aa, Homo sapiens
PDTRPAPGS

SEQ ID NO: 130247 - protein, 9 aa, Homo sapiens
DTRPAPGST

SEQ ID NO: 130248 - protein, 9 aa, Homo sapiens
TRPAPGSTA

SEQ ID NO: 130249 - protein, 9 aa, Homo sapiens
RPAPGSTAP

SEQ ID NO: 130250 - protein, 9 aa, Homo sapiens
PAPGSTAPP

SEQ ID NO: 130251 - protein, 9 aa, Homo sapiens
APGSTAPPA

SEQ ID NO: 130252 - protein, 9 aa, Homo sapiens
PGSTAPPAH

SEQ ID NO: 130253 - protein, 9 aa, Homo sapiens
GSTAPPAHG

SEQ ID NO: 130254 - protein, 9 aa, Homo sapiens
STAPPAHGV

SEQ ID NO: 130255 - protein, 9 aa, Homo sapiens
TAPPAHGVT

SEQ ID NO: 130256 - protein, 9 aa, Homo sapiens
APPAHGVTS

SEQ ID NO: 130257 - protein, 9 aa, Homo sapiens
PPAHGVTSA

SEQ ID NO: 130258 - protein, 9 aa, Homo sapiens
PAHGVTSAP

SEQ ID NO: 130259 - protein, 9 aa, Homo sapiens
AHGVTSAPD

SEQ ID NO: 130260 - protein, 9 aa, Homo sapiens
HGVTSAPDT

SEQ ID NO: 130261 - protein, 9 aa, Homo sapiens
GVTSAPDTR

SEQ ID NO: 130262 - protein, 9 aa, Homo sapiens
VTSAPDTRP

SEQ ID NO: 130263 - protein, 9 aa, Homo sapiens
TSAPDTRPA

SEQ ID NO: 130264 - protein, 9 aa, Homo sapiens
SAPDTRPAP

SEQ ID NO: 130265 - protein, 9 aa, Homo sapiens
APDTRPAPG

SEQ ID NO: 130266 - protein, 9 aa, Homo sapiens
PDTRPAPGS

SEQ ID NO: 130267 - protein, 9 aa, Homo sapiens
DTRPAPGST

SEQ ID NO: 130268 - protein, 9 aa, Homo sapiens
TRPAPGSTA

SEQ ID NO: 130269 - protein, 9 aa, Homo sapiens
RPAPGSTAP

SEQ ID NO: 130270 - protein, 9 aa, Homo sapiens
PAPGSTAPP

SEQ ID NO: 130271 - protein, 9 aa, Homo sapiens
APGSTAPPA

SEQ ID NO: 130272 - protein, 9 aa, Homo sapiens
PGSTAPPAH

SEQ ID NO: 130273 - protein, 9 aa, Homo sapiens
GSTAPPAHG

SEQ ID NO: 130274 - protein, 9 aa, Homo sapiens
STAPPAHGV

SEQ ID NO: 130275 - protein, 9 aa, Homo sapiens
TAPPAHGVT

SEQ ID NO: 130276 - protein, 9 aa, Homo sapiens
APPAHGVTS

SEQ ID NO: 130277 - protein, 9 aa, Homo sapiens
PPAHGVTSA

SEQ ID NO: 130278 - protein, 9 aa, Homo sapiens
PAHGVTSAP

SEQ ID NO: 130279 - protein, 9 aa, Homo sapiens
AHGVTSAPD

SEQ ID NO: 130280 - protein, 9 aa, Homo sapiens
HGVTSAPDT

SEQ ID NO: 130281 - protein, 9 aa, Homo sapiens
GVTSAPDTR

SEQ ID NO: 130282 - protein, 9 aa, Homo sapiens
VTSAPDTRP

SEQ ID NO: 130283 - protein, 9 aa, Homo sapiens
TSAPDTRPA

SEQ ID NO: 130284 - protein, 9 aa, Homo sapiens
SAPDTRPAP

SEQ ID NO: 130285 - protein, 9 aa, Homo sapiens
APDTRPAPG

SEQ ID NO: 130286 - protein, 9 aa, Homo sapiens
PDTRPAPGS

SEQ ID NO: 130287 - protein, 9 aa, Homo sapiens
DTRPAPGST

SEQ ID NO: 130288 - protein, 9 aa, Homo sapiens
TRPAPGSTA

SEQ ID NO: 130289 - protein, 9 aa, Homo sapiens
RPAPGSTAP

SEQ ID NO: 130290 - protein, 9 aa, Homo sapiens
PAPGSTAPP

SEQ ID NO: 130291 - protein, 9 aa, Homo sapiens
APGSTAPPA

SEQ ID NO: 130292 - protein, 9 aa, Homo sapiens
PGSTAPPAH

SEQ ID NO: 130293 - protein, 9 aa, Homo sapiens
GSTAPPAHG

SEQ ID NO: 130294 - protein, 9 aa, Homo sapiens
STAPPAHGV

SEQ ID NO: 130295 - protein, 9 aa, Homo sapiens
TAPPAHGVT

SEQ ID NO: 130296 - protein, 9 aa, Homo sapiens
APPAHGVTS

SEQ ID NO: 130297 - protein, 9 aa, Homo sapiens
PPAHGVTSA

SEQ ID NO: 130298 - protein, 9 aa, Homo sapiens
PAHGVTSAP

SEQ ID NO: 130299 - protein, 9 aa, Homo sapiens
AHGVTSAPD

SEQ ID NO: 130300 - protein, 9 aa, Homo sapiens
HGVTSAPDT

SEQ ID NO: 130301 - protein, 9 aa, Homo sapiens
GVTSAPDTR

SEQ ID NO: 130302 - protein, 9 aa, Homo sapiens
VTSAPDTRP

SEQ ID NO: 130303 - protein, 9 aa, Homo sapiens
TSAPDTRPA

SEQ ID NO: 130304 - protein, 9 aa, Homo sapiens
SAPDTRPAP

SEQ ID NO: 130305 - protein, 9 aa, Homo sapiens
APDTRPAPG

SEQ ID NO: 130306 - protein, 9 aa, Homo sapiens
PDTRPAPGS

SEQ ID NO: 130307 - protein, 9 aa, Homo sapiens
DTRPAPGST

SEQ ID NO: 130308 - protein, 9 aa, Homo sapiens
TRPAPGSTA

SEQ ID NO: 130309 - protein, 9 aa, Homo sapiens
RPAPGSTAP

SEQ ID NO: 130310 - protein, 9 aa, Homo sapiens
PAPGSTAPP

SEQ ID NO: 130311 - protein, 9 aa, Homo sapiens
APGSTAPPA

SEQ ID NO: 130312 - protein, 9 aa, Homo sapiens
PGSTAPPAH

SEQ ID NO: 130313 - protein, 9 aa, Homo sapiens
GSTAPPAHG

SEQ ID NO: 130314 - protein, 9 aa, Homo sapiens
STAPPAHGV

SEQ ID NO: 130315 - protein, 9 aa, Homo sapiens
TAPPAHGVT

SEQ ID NO: 130316 - protein, 9 aa, Homo sapiens
APPAHGVTS

SEQ ID NO: 130317 - protein, 9 aa, Homo sapiens
PPAHGVTSA

SEQ ID NO: 130318 - protein, 9 aa, Homo sapiens
PAHGVTSAP

SEQ ID NO: 130319 - protein, 9 aa, Homo sapiens
AHGVTSAPD

SEQ ID NO: 130320 - protein, 9 aa, Homo sapiens
HGVTSAPDT

SEQ ID NO: 130321 - protein, 9 aa, Homo sapiens
GVTSAPDTR

SEQ ID NO: 130322 - protein, 9 aa, Homo sapiens
VTSAPDTRP

SEQ ID NO: 130323 - protein, 9 aa, Homo sapiens
TSAPDTRPA

SEQ ID NO: 130324 - protein, 9 aa, Homo sapiens
SAPDTRPAP

SEQ ID NO: 130325 - protein, 9 aa, Homo sapiens
APDTRPAPG

SEQ ID NO: 130326 - protein, 9 aa, Homo sapiens
PDTRPAPGS

SEQ ID NO: 130327 - protein, 9 aa, Homo sapiens
DTRPAPGST

SEQ ID NO: 130328 - protein, 9 aa, Homo sapiens
TRPAPGSTA

SEQ ID NO: 130329 - protein, 9 aa, Homo sapiens
RPAPGSTAP

SEQ ID NO: 130330 - protein, 9 aa, Homo sapiens
PAPGSTAPP

SEQ ID NO: 130331 - protein, 9 aa, Homo sapiens
APGSTAPPA

SEQ ID NO: 130332 - protein, 9 aa, Homo sapiens
PGSTAPPAH

SEQ ID NO: 130333 - protein, 9 aa, Homo sapiens
GSTAPPAHG

SEQ ID NO: 130334 - protein, 9 aa, Homo sapiens
STAPPAHGV

SEQ ID NO: 130335 - protein, 9 aa, Homo sapiens
TAPPAHGVT

SEQ ID NO: 130336 - protein, 9 aa, Homo sapiens
APPAHGVTS

SEQ ID NO: 130337 - protein, 9 aa, Homo sapiens
PPAHGVTSA

SEQ ID NO: 130338 - protein, 9 aa, Homo sapiens
PAHGVTSAP

SEQ ID NO: 130339 - protein, 9 aa, Homo sapiens
AHGVTSAPD

SEQ ID NO: 130340 - protein, 9 aa, Homo sapiens
HGVTSAPDT

SEQ ID NO: 130341 - protein, 9 aa, Homo sapiens
GVTSAPDTR

SEQ ID NO: 130342 - protein, 9 aa, Homo sapiens
VTSAPDTRP

SEQ ID NO: 130343 - protein, 9 aa, Homo sapiens
TSAPDTRPA

SEQ ID NO: 130344 - protein, 9 aa, Homo sapiens
SAPDTRPAP

SEQ ID NO: 130345 - protein, 9 aa, Homo sapiens
APDTRPAPG

SEQ ID NO: 130346 - protein, 9 aa, Homo sapiens
PDTRPAPGS

SEQ ID NO: 130347 - protein, 9 aa, Homo sapiens
DTRPAPGST

SEQ ID NO: 130348 - protein, 9 aa, Homo sapiens
TRPAPGSTA

SEQ ID NO: 130349 - protein, 9 aa, Homo sapiens
RPAPGSTAP

SEQ ID NO: 130350 - protein, 9 aa, Homo sapiens
PAPGSTAPP

SEQ ID NO: 130351 - protein, 9 aa, Homo sapiens
APGSTAPPA

SEQ ID NO: 130352 - protein, 9 aa, Homo sapiens
PGSTAPPAH

SEQ ID NO: 130353 - protein, 9 aa, Homo sapiens
GSTAPPAHG

SEQ ID NO: 130354 - protein, 9 aa, Homo sapiens
STAPPAHGV

SEQ ID NO: 130355 - protein, 9 aa, Homo sapiens
TAPPAHGVT

SEQ ID NO: 130356 - protein, 9 aa, Homo sapiens
APPAHGVTS

SEQ ID NO: 130357 - protein, 9 aa, Homo sapiens
PPAHGVTSA

SEQ ID NO: 130358 - protein, 9 aa, Homo sapiens
PAHGVTSAP

SEQ ID NO: 130359 - protein, 9 aa, Homo sapiens
AHGVTSAPD

SEQ ID NO: 130360 - protein, 9 aa, Homo sapiens
HGVTSAPDT

SEQ ID NO: 130361 - protein, 9 aa, Homo sapiens
GVTSAPDTR

SEQ ID NO: 130362 - protein, 9 aa, Homo sapiens
VTSAPDTRP

SEQ ID NO: 130363 - protein, 9 aa, Homo sapiens
TSAPDTRPA

SEQ ID NO: 130364 - protein, 9 aa, Homo sapiens
SAPDTRPAP

SEQ ID NO: 130365 - protein, 9 aa, Homo sapiens
APDTRPAPG

SEQ ID NO: 130366 - protein, 9 aa, Homo sapiens
PDTRPAPGS

SEQ ID NO: 130367 - protein, 9 aa, Homo sapiens
DTRPAPGST

SEQ ID NO: 130368 - protein, 9 aa, Homo sapiens
TRPAPGSTA

SEQ ID NO: 130369 - protein, 9 aa, Homo sapiens
RPAPGSTAP

SEQ ID NO: 130370 - protein, 9 aa, Homo sapiens
PAPGSTAPP

SEQ ID NO: 130371 - protein, 9 aa, Homo sapiens
APGSTAPPA

SEQ ID NO: 130372 - protein, 9 aa, Homo sapiens
PGSTAPPAH

SEQ ID NO: 130373 - protein, 9 aa, Homo sapiens
GSTAPPAHG

SEQ ID NO: 130374 - protein, 9 aa, Homo sapiens
STAPPAHGV

SEQ ID NO: 130375 - protein, 9 aa, Homo sapiens
TAPPAHGVT

SEQ ID NO: 130376 - protein, 9 aa, Homo sapiens
APPAHGVTS

SEQ ID NO: 130377 - protein, 9 aa, Homo sapiens
PPAHGVTSA

SEQ ID NO: 130378 - protein, 9 aa, Homo sapiens
PAHGVTSAP

SEQ ID NO: 130379 - protein, 9 aa, Homo sapiens
AHGVTSAPD

SEQ ID NO: 130380 - protein, 9 aa, Homo sapiens
HGVTSAPDT

SEQ ID NO: 130381 - protein, 9 aa, Homo sapiens
GVTSAPDTR

SEQ ID NO: 130382 - protein, 9 aa, Homo sapiens
VTSAPDTRP

SEQ ID NO: 130383 - protein, 9 aa, Homo sapiens
TSAPDTRPA

SEQ ID NO: 130384 - protein, 9 aa, Homo sapiens
SAPDTRPAP

SEQ ID NO: 130385 - protein, 9 aa, Homo sapiens
APDTRPAPG

SEQ ID NO: 130386 - protein, 9 aa, Homo sapiens
PDTRPAPGS

SEQ ID NO: 130387 - protein, 9 aa, Homo sapiens
DTRPAPGST

SEQ ID NO: 130388 - protein, 9 aa, Homo sapiens
TRPAPGSTA

SEQ ID NO: 130389 - protein, 9 aa, Homo sapiens
RPAPGSTAP

SEQ ID NO: 130390 - protein, 9 aa, Homo sapiens
PAPGSTAPP

SEQ ID NO: 130391 - protein, 9 aa, Homo sapiens
APGSTAPPA

SEQ ID NO: 130392 - protein, 9 aa, Homo sapiens
PGSTAPPAH

SEQ ID NO: 130393 - protein, 9 aa, Homo sapiens
GSTAPPAHG

SEQ ID NO: 130394 - protein, 9 aa, Homo sapiens
STAPPAHGV

SEQ ID NO: 130395 - protein, 9 aa, Homo sapiens
TAPPAHGVT

SEQ ID NO: 130396 - protein, 9 aa, Homo sapiens
APPAHGVTS

SEQ ID NO: 130397 - protein, 9 aa, Homo sapiens
PPAHGVTSA

SEQ ID NO: 130398 - protein, 9 aa, Homo sapiens
PAHGVTSAP

SEQ ID NO: 130399 - protein, 9 aa, Homo sapiens
AHGVTSAPD

SEQ ID NO: 130400 - protein, 9 aa, Homo sapiens
HGVTSAPDT

SEQ ID NO: 130401 - protein, 9 aa, Homo sapiens
GVTSAPDTR

SEQ ID NO: 130402 - protein, 9 aa, Homo sapiens
VTSAPDTRP

SEQ ID NO: 130403 - protein, 9 aa, Homo sapiens
TSAPDTRPA

SEQ ID NO: 130404 - protein, 9 aa, Homo sapiens
SAPDTRPAP

SEQ ID NO: 130405 - protein, 9 aa, Homo sapiens
APDTRPAPG

SEQ ID NO: 130406 - protein, 9 aa, Homo sapiens
PDTRPAPGS

SEQ ID NO: 130407 - protein, 9 aa, Homo sapiens
DTRPAPGST

SEQ ID NO: 130408 - protein, 9 aa, Homo sapiens
TRPAPGSTA

SEQ ID NO: 130409 - protein, 9 aa, Homo sapiens
RPAPGSTAP

SEQ ID NO: 130410 - protein, 9 aa, Homo sapiens
PAPGSTAPP

SEQ ID NO: 130411 - protein, 9 aa, Homo sapiens
APGSTAPPA

SEQ ID NO: 130412 - protein, 9 aa, Homo sapiens
PGSTAPPAH

SEQ ID NO: 130413 - protein, 9 aa, Homo sapiens
GSTAPPAHG

SEQ ID NO: 130414 - protein, 9 aa, Homo sapiens
STAPPAHGV

SEQ ID NO: 130415 - protein, 9 aa, Homo sapiens
TAPPAHGVT

SEQ ID NO: 130416 - protein, 9 aa, Homo sapiens
APPAHGVTS

SEQ ID NO: 130417 - protein, 9 aa, Homo sapiens
PPAHGVTSA

SEQ ID NO: 130418 - protein, 9 aa, Homo sapiens
PAHGVTSAP

SEQ ID NO: 130419 - protein, 9 aa, Homo sapiens
AHGVTSAPD

SEQ ID NO: 130420 - protein, 9 aa, Homo sapiens
HGVTSAPDT

SEQ ID NO: 130421 - protein, 9 aa, Homo sapiens
GVTSAPDTR

SEQ ID NO: 130422 - protein, 9 aa, Homo sapiens
VTSAPDTRP

SEQ ID NO: 130423 - protein, 9 aa, Homo sapiens
TSAPDTRPA

SEQ ID NO: 130424 - protein, 9 aa, Homo sapiens
SAPDTRPAP

SEQ ID NO: 130425 - protein, 9 aa, Homo sapiens
APDTRPAPG

SEQ ID NO: 130426 - protein, 9 aa, Homo sapiens
PDTRPAPGS

SEQ ID NO: 130427 - protein, 9 aa, Homo sapiens
DTRPAPGST

SEQ ID NO: 130428 - protein, 9 aa, Homo sapiens
TRPAPGSTA

SEQ ID NO: 130429 - protein, 9 aa, Homo sapiens
RPAPGSTAP

SEQ ID NO: 130430 - protein, 9 aa, Homo sapiens
PAPGSTAPP

SEQ ID NO: 130431 - protein, 9 aa, Homo sapiens
APGSTAPPA

SEQ ID NO: 130432 - protein, 9 aa, Homo sapiens
PGSTAPPAH

SEQ ID NO: 130433 - protein, 9 aa, Homo sapiens
GSTAPPAHG

SEQ ID NO: 130434 - protein, 9 aa, Homo sapiens
STAPPAHGV

SEQ ID NO: 130435 - protein, 9 aa, Homo sapiens
TAPPAHGVT

SEQ ID NO: 130436 - protein, 9 aa, Homo sapiens
APPAHGVTS

SEQ ID NO: 130437 - protein, 9 aa, Homo sapiens
PPAHGVTSA

SEQ ID NO: 130438 - protein, 9 aa, Homo sapiens
PAHGVTSAP

SEQ ID NO: 130439 - protein, 9 aa, Homo sapiens
AHGVTSAPD

SEQ ID NO: 130440 - protein, 9 aa, Homo sapiens
HGVTSAPDT

SEQ ID NO: 130441 - protein, 9 aa, Homo sapiens
GVTSAPDTR

SEQ ID NO: 130442 - protein, 9 aa, Homo sapiens
VTSAPDTRP

SEQ ID NO: 130443 - protein, 9 aa, Homo sapiens
TSAPDTRPA

SEQ ID NO: 130444 - protein, 9 aa, Homo sapiens
SAPDTRPAP

SEQ ID NO: 130445 - protein, 9 aa, Homo sapiens
APDTRPAPG

SEQ ID NO: 130446 - protein, 9 aa, Homo sapiens
PDTRPAPGS

SEQ ID NO: 130447 - protein, 9 aa, Homo sapiens
DTRPAPGST

SEQ ID NO: 130448 - protein, 9 aa, Homo sapiens
TRPAPGSTA

SEQ ID NO: 130449 - protein, 9 aa, Homo sapiens
RPAPGSTAP

SEQ ID NO: 130450 - protein, 9 aa, Homo sapiens
PAPGSTAPP

SEQ ID NO: 130451 - protein, 9 aa, Homo sapiens
APGSTAPPA

SEQ ID NO: 130452 - protein, 9 aa, Homo sapiens
PGSTAPPAH

SEQ ID NO: 130453 - protein, 9 aa, Homo sapiens
GSTAPPAHG

SEQ ID NO: 130454 - protein, 9 aa, Homo sapiens
STAPPAHGV

SEQ ID NO: 130455 - protein, 9 aa, Homo sapiens
TAPPAHGVT

SEQ ID NO: 130456 - protein, 9 aa, Homo sapiens
APPAHGVTS

SEQ ID NO: 130457 - protein, 9 aa, Homo sapiens
PPAHGVTSA

SEQ ID NO: 130458 - protein, 9 aa, Homo sapiens
PAHGVTSAP

SEQ ID NO: 130459 - protein, 9 aa, Homo sapiens
AHGVTSAPD

SEQ ID NO: 130460 - protein, 9 aa, Homo sapiens
HGVTSAPDT

SEQ ID NO: 130461 - protein, 9 aa, Homo sapiens
GVTSAPDTR

SEQ ID NO: 130462 - protein, 9 aa, Homo sapiens
VTSAPDTRP

SEQ ID NO: 130463 - protein, 9 aa, Homo sapiens
TSAPDTRPA

SEQ ID NO: 130464 - protein, 9 aa, Homo sapiens
SAPDTRPAP

SEQ ID NO: 130465 - protein, 9 aa, Homo sapiens
APDTRPAPG

SEQ ID NO: 130466 - protein, 9 aa, Homo sapiens
PDTRPAPGS

SEQ ID NO: 130467 - protein, 9 aa, Homo sapiens
DTRPAPGST

SEQ ID NO: 130468 - protein, 9 aa, Homo sapiens
TRPAPGSTA

SEQ ID NO: 130469 - protein, 9 aa, Homo sapiens
RPAPGSTAP

SEQ ID NO: 130470 - protein, 9 aa, Homo sapiens
PAPGSTAPP

SEQ ID NO: 130471 - protein, 9 aa, Homo sapiens
APGSTAPPA

SEQ ID NO: 130472 - protein, 9 aa, Homo sapiens
PGSTAPPAH

SEQ ID NO: 130473 - protein, 9 aa, Homo sapiens
GSTAPPAHG

SEQ ID NO: 130474 - protein, 9 aa, Homo sapiens
STAPPAHGV

SEQ ID NO: 130475 - protein, 9 aa, Homo sapiens
TAPPAHGVT

SEQ ID NO: 130476 - protein, 9 aa, Homo sapiens
APPAHGVTS

SEQ ID NO: 130477 - protein, 9 aa, Homo sapiens
PPAHGVTSA

SEQ ID NO: 130478 - protein, 9 aa, Homo sapiens
PAHGVTSAP

SEQ ID NO: 130479 - protein, 9 aa, Homo sapiens
AHGVTSAPD

SEQ ID NO: 130480 - protein, 9 aa, Homo sapiens
HGVTSAPDT

SEQ ID NO: 130481 - protein, 9 aa, Homo sapiens
GVTSAPDTR

SEQ ID NO: 130482 - protein, 9 aa, Homo sapiens
VTSAPDTRP

SEQ ID NO: 130483 - protein, 9 aa, Homo sapiens
TSAPDTRPA

SEQ ID NO: 130484 - protein, 9 aa, Homo sapiens
SAPDTRPAP

SEQ ID NO: 130485 - protein, 9 aa, Homo sapiens
APDTRPAPG

SEQ ID NO: 130486 - protein, 9 aa, Homo sapiens
PDTRPAPGS

SEQ ID NO: 130487 - protein, 9 aa, Homo sapiens
DTRPAPGST

SEQ ID NO: 130488 - protein, 9 aa, Homo sapiens
TRPAPGSTA

SEQ ID NO: 130489 - protein, 9 aa, Homo sapiens
RPAPGSTAP

SEQ ID NO: 130490 - protein, 9 aa, Homo sapiens
PAPGSTAPP

SEQ ID NO: 130491 - protein, 9 aa, Homo sapiens
APGSTAPPA

SEQ ID NO: 130492 - protein, 9 aa, Homo sapiens
PGSTAPPAH

SEQ ID NO: 130493 - protein, 9 aa, Homo sapiens
GSTAPPAHG

SEQ ID NO: 130494 - protein, 9 aa, Homo sapiens
STAPPAHGV

SEQ ID NO: 130495 - protein, 9 aa, Homo sapiens
TAPPAHGVT

SEQ ID NO: 130496 - protein, 9 aa, Homo sapiens
APPAHGVTS

SEQ ID NO: 130497 - protein, 9 aa, Homo sapiens
PPAHGVTSA

SEQ ID NO: 130498 - protein, 9 aa, Homo sapiens
PAHGVTSAP

SEQ ID NO: 130499 - protein, 9 aa, Homo sapiens
AHGVTSAPD

SEQ ID NO: 130500 - protein, 9 aa, Homo sapiens
HGVTSAPDT

SEQ ID NO: 130501 - protein, 9 aa, Homo sapiens
GVTSAPDTR

SEQ ID NO: 130502 - protein, 9 aa, Homo sapiens
VTSAPDTRP

SEQ ID NO: 130503 - protein, 9 aa, Homo sapiens
TSAPDTRPA

SEQ ID NO: 130504 - protein, 9 aa, Homo sapiens
SAPDTRPAP

SEQ ID NO: 130505 - protein, 9 aa, Homo sapiens
APDTRPAPG

SEQ ID NO: 130506 - protein, 9 aa, Homo sapiens
PDTRPAPGS

SEQ ID NO: 130507 - protein, 9 aa, Homo sapiens
DTRPAPGST

SEQ ID NO: 130508 - protein, 9 aa, Homo sapiens
TRPAPGSTA

SEQ ID NO: 130509 - protein, 9 aa, Homo sapiens
RPAPGSTAP

SEQ ID NO: 130510 - protein, 9 aa, Homo sapiens
PAPGSTAPP

SEQ ID NO: 130511 - protein, 9 aa, Homo sapiens
APGSTAPPA

SEQ ID NO: 130512 - protein, 9 aa, Homo sapiens
PGSTAPPAH

SEQ ID NO: 130513 - protein, 9 aa, Homo sapiens
GSTAPPAHG

SEQ ID NO: 130514 - protein, 9 aa, Homo sapiens
STAPPAHGV

SEQ ID NO: 130515 - protein, 9 aa, Homo sapiens
TAPPAHGVT

SEQ ID NO: 130516 - protein, 9 aa, Homo sapiens
APPAHGVTS

SEQ ID NO: 130517 - protein, 9 aa, Homo sapiens
PPAHGVTSA

SEQ ID NO: 130518 - protein, 9 aa, Homo sapiens
PAHGVTSAP

SEQ ID NO: 130519 - protein, 9 aa, Homo sapiens
AHGVTSAPD

SEQ ID NO: 130520 - protein, 9 aa, Homo sapiens
HGVTSAPDT

SEQ ID NO: 130521 - protein, 9 aa, Homo sapiens
GVTSAPDTR

SEQ ID NO: 130522 - protein, 9 aa, Homo sapiens
VTSAPDTRP

SEQ ID NO: 130523 - protein, 9 aa, Homo sapiens
TSAPDTRPA

SEQ ID NO: 130524 - protein, 9 aa, Homo sapiens
SAPDTRPAP

SEQ ID NO: 130525 - protein, 9 aa, Homo sapiens
APDTRPAPG

SEQ ID NO: 130526 - protein, 9 aa, Homo sapiens
PDTRPAPGS

SEQ ID NO: 130527 - protein, 9 aa, Homo sapiens
DTRPAPGST

SEQ ID NO: 130528 - protein, 9 aa, Homo sapiens
TRPAPGSTA

SEQ ID NO: 130529 - protein, 9 aa, Homo sapiens
RPAPGSTAP

SEQ ID NO: 130530 - protein, 9 aa, Homo sapiens
PAPGSTAPP

SEQ ID NO: 130531 - protein, 9 aa, Homo sapiens
APGSTAPPA

SEQ ID NO: 130532 - protein, 9 aa, Homo sapiens
PGSTAPPAH

SEQ ID NO: 130533 - protein, 9 aa, Homo sapiens
GSTAPPAHG

SEQ ID NO: 130534 - protein, 9 aa, Homo sapiens
STAPPAHGV

SEQ ID NO: 130535 - protein, 9 aa, Homo sapiens
TAPPAHGVT

SEQ ID NO: 130536 - protein, 9 aa, Homo sapiens
APPAHGVTS

SEQ ID NO: 130537 - protein, 9 aa, Homo sapiens
PPAHGVTSA

SEQ ID NO: 130538 - protein, 9 aa, Homo sapiens
PAHGVTSAP

SEQ ID NO: 130539 - protein, 9 aa, Homo sapiens
AHGVTSAPD

SEQ ID NO: 130540 - protein, 9 aa, Homo sapiens
HGVTSAPDT

SEQ ID NO: 130541 - protein, 9 aa, Homo sapiens
GVTSAPDTR

SEQ ID NO: 130542 - protein, 9 aa, Homo sapiens
VTSAPDTRP

SEQ ID NO: 130543 - protein, 9 aa, Homo sapiens
TSAPDTRPA

SEQ ID NO: 130544 - protein, 9 aa, Homo sapiens
SAPDTRPAP

SEQ ID NO: 130545 - protein, 9 aa, Homo sapiens
APDTRPAPG

SEQ ID NO: 130546 - protein, 9 aa, Homo sapiens
PDTRPAPGS

SEQ ID NO: 130547 - protein, 9 aa, Homo sapiens
DTRPAPGST

SEQ ID NO: 130548 - protein, 9 aa, Homo sapiens
TRPAPGSTA

SEQ ID NO: 130549 - protein, 9 aa, Homo sapiens
RPAPGSTAP

SEQ ID NO: 130550 - protein, 9 aa, Homo sapiens
PAPGSTAPP

SEQ ID NO: 130551 - protein, 9 aa, Homo sapiens
APGSTAPPA

SEQ ID NO: 130552 - protein, 9 aa, Homo sapiens
PGSTAPPAH

SEQ ID NO: 130553 - protein, 9 aa, Homo sapiens
GSTAPPAHG

SEQ ID NO: 130554 - protein, 9 aa, Homo sapiens
STAPPAHGV

SEQ ID NO: 130555 - protein, 9 aa, Homo sapiens
TAPPAHGVT

SEQ ID NO: 130556 - protein, 9 aa, Homo sapiens
APPAHGVTS

SEQ ID NO: 130557 - protein, 9 aa, Homo sapiens
PPAHGVTSA

SEQ ID NO: 130558 - protein, 9 aa, Homo sapiens
PAHGVTSAP

SEQ ID NO: 130559 - protein, 9 aa, Homo sapiens
AHGVTSAPD

SEQ ID NO: 130560 - protein, 9 aa, Homo sapiens
HGVTSAPDT

SEQ ID NO: 130561 - protein, 9 aa, Homo sapiens
GVTSAPDTR

SEQ ID NO: 130562 - protein, 9 aa, Homo sapiens
VTSAPDTRP

SEQ ID NO: 130563 - protein, 9 aa, Homo sapiens
TSAPDTRPA

SEQ ID NO: 130564 - protein, 9 aa, Homo sapiens
SAPDTRPAP

SEQ ID NO: 130565 - protein, 9 aa, Homo sapiens
APDTRPAPG

SEQ ID NO: 130566 - protein, 9 aa, Homo sapiens
PDTRPAPGS

SEQ ID NO: 130567 - protein, 9 aa, Homo sapiens
DTRPAPGST

SEQ ID NO: 130568 - protein, 9 aa, Homo sapiens
TRPAPGSTA

SEQ ID NO: 130569 - protein, 9 aa, Homo sapiens
RPAPGSTAP

SEQ ID NO: 130570 - protein, 9 aa, Homo sapiens
PAPGSTAPP

SEQ ID NO: 130571 - protein, 9 aa, Homo sapiens
APGSTAPPA

SEQ ID NO: 130572 - protein, 9 aa, Homo sapiens
PGSTAPPAH

SEQ ID NO: 130573 - protein, 9 aa, Homo sapiens
GSTAPPAHG

SEQ ID NO: 130574 - protein, 9 aa, Homo sapiens
STAPPAHGV

SEQ ID NO: 130575 - protein, 9 aa, Homo sapiens
TAPPAHGVT

SEQ ID NO: 130576 - protein, 9 aa, Homo sapiens
APPAHGVTS

SEQ ID NO: 130577 - protein, 9 aa, Homo sapiens
PPAHGVTSA

SEQ ID NO: 130578 - protein, 9 aa, Homo sapiens
PAHGVTSAP

SEQ ID NO: 130579 - protein, 9 aa, Homo sapiens
AHGVTSAPD

SEQ ID NO: 130580 - protein, 9 aa, Homo sapiens
HGVTSAPDT

SEQ ID NO: 130581 - protein, 9 aa, Homo sapiens
GVTSAPDTR

SEQ ID NO: 130582 - protein, 9 aa, Homo sapiens
VTSAPDTRP

SEQ ID NO: 130583 - protein, 9 aa, Homo sapiens
TSAPDTRPA

SEQ ID NO: 130584 - protein, 9 aa, Homo sapiens
SAPDTRPAP

SEQ ID NO: 130585 - protein, 9 aa, Homo sapiens
APDTRPAPG

SEQ ID NO: 130586 - protein, 9 aa, Homo sapiens
PDTRPAPGS

SEQ ID NO: 130587 - protein, 9 aa, Homo sapiens
DTRPAPGST

SEQ ID NO: 130588 - protein, 9 aa, Homo sapiens
TRPAPGSTA

SEQ ID NO: 130589 - protein, 9 aa, Homo sapiens
RPAPGSTAP

SEQ ID NO: 130590 - protein, 9 aa, Homo sapiens
PAPGSTAPP

SEQ ID NO: 130591 - protein, 9 aa, Homo sapiens
APGSTAPPA

SEQ ID NO: 130592 - protein, 9 aa, Homo sapiens
PGSTAPPAH

SEQ ID NO: 130593 - protein, 9 aa, Homo sapiens
GSTAPPAHG

SEQ ID NO: 130594 - protein, 9 aa, Homo sapiens
STAPPAHGV

SEQ ID NO: 130595 - protein, 9 aa, Homo sapiens
TAPPAHGVT

SEQ ID NO: 130596 - protein, 9 aa, Homo sapiens
APPAHGVTS

SEQ ID NO: 130597 - protein, 9 aa, Homo sapiens
PPAHGVTSA

SEQ ID NO: 130598 - protein, 9 aa, Homo sapiens
PAHGVTSAP

SEQ ID NO: 130599 - protein, 9 aa, Homo sapiens
AHGVTSAPD

SEQ ID NO: 130600 - protein, 9 aa, Homo sapiens
HGVTSAPDT

SEQ ID NO: 130601 - protein, 9 aa, Homo sapiens
GVTSAPDTR

SEQ ID NO: 130602 - protein, 9 aa, Homo sapiens
VTSAPDTRP

SEQ ID NO: 130603 - protein, 9 aa, Homo sapiens
TSAPDTRPA

SEQ ID NO: 130604 - protein, 9 aa, Homo sapiens
SAPDTRPAP

SEQ ID NO: 130605 - protein, 9 aa, Homo sapiens
APDTRPAPG

SEQ ID NO: 130606 - protein, 9 aa, Homo sapiens
PDTRPAPGS

SEQ ID NO: 130607 - protein, 9 aa, Homo sapiens
DTRPAPGST

SEQ ID NO: 130608 - protein, 9 aa, Homo sapiens
TRPAPGSTA

SEQ ID NO: 130609 - protein, 9 aa, Homo sapiens
RPAPGSTAP

SEQ ID NO: 130610 - protein, 9 aa, Homo sapiens
PAPGSTAPP

SEQ ID NO: 130611 - protein, 9 aa, Homo sapiens
APGSTAPPA

SEQ ID NO: 130612 - protein, 9 aa, Homo sapiens
PGSTAPPAH

SEQ ID NO: 130613 - protein, 9 aa, Homo sapiens
GSTAPPAHG

SEQ ID NO: 130614 - protein, 9 aa, Homo sapiens
STAPPAHGV

SEQ ID NO: 130615 - protein, 9 aa, Homo sapiens
TAPPAHGVT

SEQ ID NO: 130616 - protein, 9 aa, Homo sapiens
APPAHGVTS

SEQ ID NO: 130617 - protein, 9 aa, Homo sapiens
PPAHGVTSA

SEQ ID NO: 130618 - protein, 9 aa, Homo sapiens
PAHGVTSAP

SEQ ID NO: 130619 - protein, 9 aa, Homo sapiens
AHGVTSAPD

SEQ ID NO: 130620 - protein, 9 aa, Homo sapiens
HGVTSAPDT

SEQ ID NO: 130621 - protein, 9 aa, Homo sapiens
GVTSAPDTR

SEQ ID NO: 130622 - protein, 9 aa, Homo sapiens
VTSAPDTRP

SEQ ID NO: 130623 - protein, 9 aa, Homo sapiens
TSAPDTRPA

SEQ ID NO: 130624 - protein, 9 aa, Homo sapiens
SAPDTRPAP

SEQ ID NO: 130625 - protein, 9 aa, Homo sapiens
APDTRPAPG

SEQ ID NO: 130626 - protein, 9 aa, Homo sapiens
PDTRPAPGS

SEQ ID NO: 130627 - protein, 9 aa, Homo sapiens
DTRPAPGST

SEQ ID NO: 130628 - protein, 9 aa, Homo sapiens
TRPAPGSTA

SEQ ID NO: 130629 - protein, 9 aa, Homo sapiens
RPAPGSTAP

SEQ ID NO: 130630 - protein, 9 aa, Homo sapiens
PAPGSTAPP

SEQ ID NO: 130631 - protein, 9 aa, Homo sapiens
APGSTAPPA

SEQ ID NO: 130632 - protein, 9 aa, Homo sapiens
PGSTAPPAH

SEQ ID NO: 130633 - protein, 9 aa, Homo sapiens
GSTAPPAHG

SEQ ID NO: 130634 - protein, 9 aa, Homo sapiens
STAPPAHGV

SEQ ID NO: 130635 - protein, 9 aa, Homo sapiens
TAPPAHGVT

SEQ ID NO: 130636 - protein, 9 aa, Homo sapiens
APPAHGVTS

SEQ ID NO: 130637 - protein, 9 aa, Homo sapiens
PPAHGVTSA

SEQ ID NO: 130638 - protein, 9 aa, Homo sapiens
PAHGVTSAP

SEQ ID NO: 130639 - protein, 9 aa, Homo sapiens
AHGVTSAPD

SEQ ID NO: 130640 - protein, 9 aa, Homo sapiens
HGVTSAPDT

SEQ ID NO: 130641 - protein, 9 aa, Homo sapiens
GVTSAPDTR

SEQ ID NO: 130642 - protein, 9 aa, Homo sapiens
VTSAPDTRP

SEQ ID NO: 130643 - protein, 9 aa, Homo sapiens
TSAPDTRPA

SEQ ID NO: 130644 - protein, 9 aa, Homo sapiens
SAPDTRPAP

SEQ ID NO: 130645 - protein, 9 aa, Homo sapiens
APDTRPAPG

SEQ ID NO: 130646 - protein, 9 aa, Homo sapiens
PDTRPAPGS

SEQ ID NO: 130647 - protein, 9 aa, Homo sapiens
DTRPAPGST

SEQ ID NO: 130648 - protein, 9 aa, Homo sapiens
TRPAPGSTA

SEQ ID NO: 130649 - protein, 9 aa, Homo sapiens
RPAPGSTAP

SEQ ID NO: 130650 - protein, 9 aa, Homo sapiens
PAPGSTAPP

SEQ ID NO: 130651 - protein, 9 aa, Homo sapiens
APGSTAPPA

SEQ ID NO: 130652 - protein, 9 aa, Homo sapiens
PGSTAPPAH

SEQ ID NO: 130653 - protein, 9 aa, Homo sapiens
GSTAPPAHG

SEQ ID NO: 130654 - protein, 9 aa, Homo sapiens
STAPPAHGV

SEQ ID NO: 130655 - protein, 9 aa, Homo sapiens
TAPPAHGVT

SEQ ID NO: 130656 - protein, 9 aa, Homo sapiens
APPAHGVTS

SEQ ID NO: 130657 - protein, 9 aa, Homo sapiens
PPAHGVTSA

SEQ ID NO: 130658 - protein, 9 aa, Homo sapiens
PAHGVTSAP

SEQ ID NO: 130659 - protein, 9 aa, Homo sapiens
AHGVTSAPD

SEQ ID NO: 130660 - protein, 9 aa, Homo sapiens
HGVTSAPDT

SEQ ID NO: 130661 - protein, 9 aa, Homo sapiens
GVTSAPDTR

SEQ ID NO: 130662 - protein, 9 aa, Homo sapiens
VTSAPDTRP

SEQ ID NO: 130663 - protein, 9 aa, Homo sapiens
TSAPDTRPA

SEQ ID NO: 130664 - protein, 9 aa, Homo sapiens
SAPDTRPAP

SEQ ID NO: 130665 - protein, 9 aa, Homo sapiens
APDTRPAPG

SEQ ID NO: 130666 - protein, 9 aa, Homo sapiens
PDTRPAPGS

SEQ ID NO: 130667 - protein, 9 aa, Homo sapiens
DTRPAPGST

SEQ ID NO: 130668 - protein, 9 aa, Homo sapiens
TRPAPGSTA

SEQ ID NO: 130669 - protein, 9 aa, Homo sapiens
RPAPGSTAP

SEQ ID NO: 130670 - protein, 9 aa, Homo sapiens
PAPGSTAPP

SEQ ID NO: 130671 - protein, 9 aa, Homo sapiens
APGSTAPPA

SEQ ID NO: 130672 - protein, 9 aa, Homo sapiens
PGSTAPPAH

SEQ ID NO: 130673 - protein, 9 aa, Homo sapiens
GSTAPPAHG

SEQ ID NO: 130674 - protein, 9 aa, Homo sapiens
STAPPAHGV

SEQ ID NO: 130675 - protein, 9 aa, Homo sapiens
TAPPAHGVT

SEQ ID NO: 130676 - protein, 9 aa, Homo sapiens
APPAHGVTS

SEQ ID NO: 130677 - protein, 9 aa, Homo sapiens
PPAHGVTSA

SEQ ID NO: 130678 - protein, 9 aa, Homo sapiens
PAHGVTSAP

SEQ ID NO: 130679 - protein, 9 aa, Homo sapiens
AHGVTSAPD

SEQ ID NO: 130680 - protein, 9 aa, Homo sapiens
HGVTSAPDT

SEQ ID NO: 130681 - protein, 9 aa, Homo sapiens
GVTSAPDTR

SEQ ID NO: 130682 - protein, 9 aa, Homo sapiens
VTSAPDTRP

SEQ ID NO: 130683 - protein, 9 aa, Homo sapiens
TSAPDTRPA

SEQ ID NO: 130684 - protein, 9 aa, Homo sapiens
SAPDTRPAP

SEQ ID NO: 130685 - protein, 9 aa, Homo sapiens
APDTRPAPG

SEQ ID NO: 130686 - protein, 9 aa, Homo sapiens
PDTRPAPGS

SEQ ID NO: 130687 - protein, 9 aa, Homo sapiens
DTRPAPGST

SEQ ID NO: 130688 - protein, 9 aa, Homo sapiens
TRPAPGSTA

SEQ ID NO: 130689 - protein, 9 aa, Homo sapiens
RPAPGSTAP

SEQ ID NO: 130690 - protein, 9 aa, Homo sapiens
PAPGSTAPP

SEQ ID NO: 130691 - protein, 9 aa, Homo sapiens
APGSTAPPA

SEQ ID NO: 130692 - protein, 9 aa, Homo sapiens
PGSTAPPAH

SEQ ID NO: 130693 - protein, 9 aa, Homo sapiens
GSTAPPAHG

SEQ ID NO: 130694 - protein, 9 aa, Homo sapiens
STAPPAHGV

SEQ ID NO: 130695 - protein, 9 aa, Homo sapiens
TAPPAHGVT

SEQ ID NO: 130696 - protein, 9 aa, Homo sapiens
APPAHGVTS

SEQ ID NO: 130697 - protein, 9 aa, Homo sapiens
PPAHGVTSA

SEQ ID NO: 130698 - protein, 9 aa, Homo sapiens
PAHGVTSAP

SEQ ID NO: 130699 - protein, 9 aa, Homo sapiens
AHGVTSAPD

SEQ ID NO: 130700 - protein, 9 aa, Homo sapiens
HGVTSAPDT

SEQ ID NO: 130701 - protein, 9 aa, Homo sapiens
GVTSAPDTR

SEQ ID NO: 130702 - protein, 9 aa, Homo sapiens
VTSAPDTRP

SEQ ID NO: 130703 - protein, 9 aa, Homo sapiens
TSAPDTRPA

SEQ ID NO: 130704 - protein, 9 aa, Homo sapiens
SAPDTRPAP

SEQ ID NO: 130705 - protein, 9 aa, Homo sapiens
APDTRPAPG

SEQ ID NO: 130706 - protein, 9 aa, Homo sapiens
PDTRPAPGS

SEQ ID NO: 130707 - protein, 9 aa, Homo sapiens
DTRPAPGST

SEQ ID NO: 130708 - protein, 9 aa, Homo sapiens
TRPAPGSTA

SEQ ID NO: 130709 - protein, 9 aa, Homo sapiens
RPAPGSTAP

SEQ ID NO: 130710 - protein, 9 aa, Homo sapiens
PAPGSTAPP

SEQ ID NO: 130711 - protein, 9 aa, Homo sapiens
APGSTAPPA

SEQ ID NO: 130712 - protein, 9 aa, Homo sapiens
PGSTAPPAH

SEQ ID NO: 130713 - protein, 9 aa, Homo sapiens
GSTAPPAHG

SEQ ID NO: 130714 - protein, 9 aa, Homo sapiens
STAPPAHGV

SEQ ID NO: 130715 - protein, 9 aa, Homo sapiens
TAPPAHGVT

SEQ ID NO: 130716 - protein, 9 aa, Homo sapiens
APPAHGVTS

SEQ ID NO: 130717 - protein, 9 aa, Homo sapiens
PPAHGVTSA

SEQ ID NO: 130718 - protein, 9 aa, Homo sapiens
PAHGVTSAP

SEQ ID NO: 130719 - protein, 9 aa, Homo sapiens
AHGVTSAPD

SEQ ID NO: 130720 - protein, 9 aa, Homo sapiens
HGVTSAPDT

SEQ ID NO: 130721 - protein, 9 aa, Homo sapiens
GVTSAPDTR

SEQ ID NO: 130722 - protein, 9 aa, Homo sapiens
VTSAPDTRP

SEQ ID NO: 130723 - protein, 9 aa, Homo sapiens
TSAPDTRPA

SEQ ID NO: 130724 - protein, 9 aa, Homo sapiens
SAPDTRPAP

SEQ ID NO: 130725 - protein, 9 aa, Homo sapiens
APDTRPAPG

SEQ ID NO: 130726 - protein, 9 aa, Homo sapiens
PDTRPAPGS

SEQ ID NO: 130727 - protein, 9 aa, Homo sapiens
DTRPAPGST

SEQ ID NO: 130728 - protein, 9 aa, Homo sapiens
TRPAPGSTA

SEQ ID NO: 130729 - protein, 9 aa, Homo sapiens
RPAPGSTAP

SEQ ID NO: 130730 - protein, 9 aa, Homo sapiens
PAPGSTAPP

SEQ ID NO: 130731 - protein, 9 aa, Homo sapiens
APGSTAPPA

SEQ ID NO: 130732 - protein, 9 aa, Homo sapiens
PGSTAPPAH

SEQ ID NO: 130733 - protein, 9 aa, Homo sapiens
GSTAPPAHG

SEQ ID NO: 130734 - protein, 9 aa, Homo sapiens
STAPPAHGV

SEQ ID NO: 130735 - protein, 9 aa, Homo sapiens
TAPPAHGVT

SEQ ID NO: 130736 - protein, 9 aa, Homo sapiens
APPAHGVTS

SEQ ID NO: 130737 - protein, 9 aa, Homo sapiens
PPAHGVTSA

SEQ ID NO: 130738 - protein, 9 aa, Homo sapiens
PAHGVTSAP

SEQ ID NO: 130739 - protein, 9 aa, Homo sapiens
AHGVTSAPD

SEQ ID NO: 130740 - protein, 9 aa, Homo sapiens
HGVTSAPDT

SEQ ID NO: 130741 - protein, 9 aa, Homo sapiens
GVTSAPDTR

SEQ ID NO: 130742 - protein, 9 aa, Homo sapiens
VTSAPDTRP

SEQ ID NO: 130743 - protein, 9 aa, Homo sapiens
TSAPDTRPA

SEQ ID NO: 130744 - protein, 9 aa, Homo sapiens
SAPDTRPAP

SEQ ID NO: 130745 - protein, 9 aa, Homo sapiens
APDTRPAPG

SEQ ID NO: 130746 - protein, 9 aa, Homo sapiens
PDTRPAPGS

SEQ ID NO: 130747 - protein, 9 aa, Homo sapiens
DTRPAPGST

SEQ ID NO: 130748 - protein, 9 aa, Homo sapiens
TRPAPGSTA

SEQ ID NO: 130749 - protein, 9 aa, Homo sapiens
RPAPGSTAP

SEQ ID NO: 130750 - protein, 9 aa, Homo sapiens
PAPGSTAPP

SEQ ID NO: 130751 - protein, 9 aa, Homo sapiens
APGSTAPPA

SEQ ID NO: 130752 - protein, 9 aa, Homo sapiens
PGSTAPPAH

SEQ ID NO: 130753 - protein, 9 aa, Homo sapiens
GSTAPPAHG

SEQ ID NO: 130754 - protein, 9 aa, Homo sapiens
STAPPAHGV

SEQ ID NO: 130755 - protein, 9 aa, Homo sapiens
TAPPAHGVT

SEQ ID NO: 130756 - protein, 9 aa, Homo sapiens
APPAHGVTS

SEQ ID NO: 130757 - protein, 9 aa, Homo sapiens
PPAHGVTSA

SEQ ID NO: 130758 - protein, 9 aa, Homo sapiens
PAHGVTSAP

SEQ ID NO: 130759 - protein, 9 aa, Homo sapiens
AHGVTSAPD

SEQ ID NO: 130760 - protein, 9 aa, Homo sapiens
HGVTSAPDT

SEQ ID NO: 130761 - protein, 9 aa, Homo sapiens
GVTSAPDTR

SEQ ID NO: 130762 - protein, 9 aa, Homo sapiens
VTSAPDTRP

SEQ ID NO: 130763 - protein, 9 aa, Homo sapiens
TSAPDTRPA

SEQ ID NO: 130764 - protein, 9 aa, Homo sapiens
SAPDTRPAP

SEQ ID NO: 130765 - protein, 9 aa, Homo sapiens
APDTRPAPG

SEQ ID NO: 130766 - protein, 9 aa, Homo sapiens
PDTRPAPGS

SEQ ID NO: 130767 - protein, 9 aa, Homo sapiens
DTRPAPGST

SEQ ID NO: 130768 - protein, 9 aa, Homo sapiens
TRPAPGSTA

SEQ ID NO: 130769 - protein, 9 aa, Homo sapiens
RPAPGSTAP

SEQ ID NO: 130770 - protein, 9 aa, Homo sapiens
PAPGSTAPP

SEQ ID NO: 130771 - protein, 9 aa, Homo sapiens
APGSTAPPA

SEQ ID NO: 130772 - protein, 9 aa, Homo sapiens
PGSTAPPAH

SEQ ID NO: 130773 - protein, 9 aa, Homo sapiens
GSTAPPAHG

SEQ ID NO: 130774 - protein, 9 aa, Homo sapiens
STAPPAHGV

SEQ ID NO: 130775 - protein, 9 aa, Homo sapiens
TAPPAHGVT

SEQ ID NO: 130776 - protein, 9 aa, Homo sapiens
APPAHGVTS

SEQ ID NO: 130777 - protein, 9 aa, Homo sapiens
PPAHGVTSA

SEQ ID NO: 130778 - protein, 9 aa, Homo sapiens
PAHGVTSAP

SEQ ID NO: 130779 - protein, 9 aa, Homo sapiens
AHGVTSAPD

SEQ ID NO: 130780 - protein, 9 aa, Homo sapiens
HGVTSAPDT

SEQ ID NO: 130781 - protein, 9 aa, Homo sapiens
GVTSAPDTR

SEQ ID NO: 130782 - protein, 9 aa, Homo sapiens
VTSAPDTRP

SEQ ID NO: 130783 - protein, 9 aa, Homo sapiens
TSAPDTRPA

SEQ ID NO: 130784 - protein, 9 aa, Homo sapiens
SAPDTRPAP

SEQ ID NO: 130785 - protein, 9 aa, Homo sapiens
APDTRPAPG

SEQ ID NO: 130786 - protein, 9 aa, Homo sapiens
PDTRPAPGS

SEQ ID NO: 130787 - protein, 9 aa, Homo sapiens
DTRPAPGST

SEQ ID NO: 130788 - protein, 9 aa, Homo sapiens
TRPAPGSTA

SEQ ID NO: 130789 - protein, 9 aa, Homo sapiens
RPAPGSTAP

SEQ ID NO: 130790 - protein, 9 aa, Homo sapiens
PAPGSTAPP

SEQ ID NO: 130791 - protein, 9 aa, Homo sapiens
APGSTAPPA

SEQ ID NO: 130792 - protein, 9 aa, Homo sapiens
PGSTAPPAH

SEQ ID NO: 130793 - protein, 9 aa, Homo sapiens
GSTAPPAHG

SEQ ID NO: 130794 - protein, 9 aa, Homo sapiens
STAPPAHGV

SEQ ID NO: 130795 - protein, 9 aa, Homo sapiens
TAPPAHGVT

SEQ ID NO: 130796 - protein, 9 aa, Homo sapiens
APPAHGVTS

SEQ ID NO: 130797 - protein, 9 aa, Homo sapiens
PPAHGVTSA

SEQ ID NO: 130798 - protein, 9 aa, Homo sapiens
PAHGVTSAP

SEQ ID NO: 130799 - protein, 9 aa, Homo sapiens
AHGVTSAPD

SEQ ID NO: 130800 - protein, 9 aa, Homo sapiens
HGVTSAPDT

SEQ ID NO: 130801 - protein, 9 aa, Homo sapiens
GVTSAPDTR

SEQ ID NO: 130802 - protein, 9 aa, Homo sapiens
VTSAPDTRP

SEQ ID NO: 130803 - protein, 9 aa, Homo sapiens
TSAPDTRPA

SEQ ID NO: 130804 - protein, 9 aa, Homo sapiens
SAPDTRPAP

SEQ ID NO: 130805 - protein, 9 aa, Homo sapiens
APDTRPAPG

SEQ ID NO: 130806 - protein, 9 aa, Homo sapiens
PDTRPAPGS

SEQ ID NO: 130807 - protein, 9 aa, Homo sapiens
DTRPAPGST

SEQ ID NO: 130808 - protein, 9 aa, Homo sapiens
TRPAPGSTA

SEQ ID NO: 130809 - protein, 9 aa, Homo sapiens
RPAPGSTAP

SEQ ID NO: 130810 - protein, 9 aa, Homo sapiens
PAPGSTAPP

SEQ ID NO: 130811 - protein, 9 aa, Homo sapiens
APGSTAPPA

SEQ ID NO: 130812 - protein, 9 aa, Homo sapiens
PGSTAPPAH

SEQ ID NO: 130813 - protein, 9 aa, Homo sapiens
GSTAPPAHG

SEQ ID NO: 130814 - protein, 9 aa, Homo sapiens
STAPPAHGV

SEQ ID NO: 130815 - protein, 9 aa, Homo sapiens
TAPPAHGVT

SEQ ID NO: 130816 - protein, 9 aa, Homo sapiens
APPAHGVTS

SEQ ID NO: 130817 - protein, 9 aa, Homo sapiens
PPAHGVTSA

SEQ ID NO: 130818 - protein, 9 aa, Homo sapiens
PAHGVTSAP

SEQ ID NO: 130819 - protein, 9 aa, Homo sapiens
AHGVTSAPD

SEQ ID NO: 130820 - protein, 9 aa, Homo sapiens
HGVTSAPDT

SEQ ID NO: 130821 - protein, 9 aa, Homo sapiens
GVTSAPDTR

SEQ ID NO: 130822 - protein, 9 aa, Homo sapiens
VTSAPDTRP

SEQ ID NO: 130823 - protein, 9 aa, Homo sapiens
TSAPDTRPA

SEQ ID NO: 130824 - protein, 9 aa, Homo sapiens
SAPDTRPAP

SEQ ID NO: 130825 - protein, 9 aa, Homo sapiens
APDTRPAPG

SEQ ID NO: 130826 - protein, 9 aa, Homo sapiens
PDTRPAPGS

SEQ ID NO: 130827 - protein, 9 aa, Homo sapiens
DTRPAPGST

SEQ ID NO: 130828 - protein, 9 aa, Homo sapiens
TRPAPGSTA

SEQ ID NO: 130829 - protein, 9 aa, Homo sapiens
RPAPGSTAP

SEQ ID NO: 130830 - protein, 9 aa, Homo sapiens
PAPGSTAPP

SEQ ID NO: 130831 - protein, 9 aa, Homo sapiens
APGSTAPPA

SEQ ID NO: 130832 - protein, 9 aa, Homo sapiens
PGSTAPPAH

SEQ ID NO: 130833 - protein, 9 aa, Homo sapiens
GSTAPPAHG

SEQ ID NO: 130834 - protein, 9 aa, Homo sapiens
STAPPAHGV

SEQ ID NO: 130835 - protein, 9 aa, Homo sapiens
TAPPAHGVT

SEQ ID NO: 130836 - protein, 9 aa, Homo sapiens
APPAHGVTS

SEQ ID NO: 130837 - protein, 9 aa, Homo sapiens
PPAHGVTSA

SEQ ID NO: 130838 - protein, 9 aa, Homo sapiens
PAHGVTSAP

SEQ ID NO: 130839 - protein, 9 aa, Homo sapiens
AHGVTSAPD

SEQ ID NO: 130840 - protein, 9 aa, Homo sapiens
HGVTSAPDT

SEQ ID NO: 130841 - protein, 9 aa, Homo sapiens
GVTSAPDTR

SEQ ID NO: 130842 - protein, 9 aa, Homo sapiens
VTSAPDTRP

SEQ ID NO: 130843 - protein, 9 aa, Homo sapiens
TSAPDTRPA

SEQ ID NO: 130844 - protein, 9 aa, Homo sapiens
SAPDTRPAP

SEQ ID NO: 130845 - protein, 9 aa, Homo sapiens
APDTRPAPG

SEQ ID NO: 130846 - protein, 9 aa, Homo sapiens
PDTRPAPGS

SEQ ID NO: 130847 - protein, 9 aa, Homo sapiens
DTRPAPGST

SEQ ID NO: 130848 - protein, 9 aa, Homo sapiens
TRPAPGSTA

SEQ ID NO: 130849 - protein, 9 aa, Homo sapiens
RPAPGSTAP

SEQ ID NO: 130850 - protein, 9 aa, Homo sapiens
PAPGSTAPP

SEQ ID NO: 130851 - protein, 9 aa, Homo sapiens
APGSTAPPA

SEQ ID NO: 130852 - protein, 9 aa, Homo sapiens
PGSTAPPAH

SEQ ID NO: 130853 - protein, 9 aa, Homo sapiens
GSTAPPAHG

SEQ ID NO: 130854 - protein, 9 aa, Homo sapiens
STAPPAHGV

SEQ ID NO: 130855 - protein, 9 aa, Homo sapiens
TAPPAHGVT

SEQ ID NO: 130856 - protein, 9 aa, Homo sapiens
APPAHGVTS

SEQ ID NO: 130857 - protein, 9 aa, Homo sapiens
PPAHGVTSA

SEQ ID NO: 130858 - protein, 9 aa, Homo sapiens
PAHGVTSAP

SEQ ID NO: 130859 - protein, 9 aa, Homo sapiens
AHGVTSAPD

SEQ ID NO: 130860 - protein, 9 aa, Homo sapiens
HGVTSAPDT

SEQ ID NO: 130861 - protein, 9 aa, Homo sapiens
GVTSAPDTR

SEQ ID NO: 130862 - protein, 9 aa, Homo sapiens
VTSAPDTRP

SEQ ID NO: 130863 - protein, 9 aa, Homo sapiens
TSAPDTRPA

SEQ ID NO: 130864 - protein, 9 aa, Homo sapiens
SAPDTRPAP

SEQ ID NO: 130865 - protein, 9 aa, Homo sapiens
APDTRPAPG

SEQ ID NO: 130866 - protein, 9 aa, Homo sapiens
PDTRPAPGS

SEQ ID NO: 130867 - protein, 9 aa, Homo sapiens
DTRPAPGST

SEQ ID NO: 130868 - protein, 9 aa, Homo sapiens
TRPAPGSTA

SEQ ID NO: 130869 - protein, 9 aa, Homo sapiens
RPAPGSTAP

SEQ ID NO: 130870 - protein, 9 aa, Homo sapiens
PAPGSTAPP

SEQ ID NO: 130871 - protein, 9 aa, Homo sapiens
APGSTAPPA

SEQ ID NO: 130872 - protein, 9 aa, Homo sapiens
PGSTAPPAH

SEQ ID NO: 130873 - protein, 9 aa, Homo sapiens
GSTAPPAHG

SEQ ID NO: 130874 - protein, 9 aa, Homo sapiens
STAPPAHGV

SEQ ID NO: 130875 - protein, 9 aa, Homo sapiens
TAPPAHGVT

SEQ ID NO: 130876 - protein, 9 aa, Homo sapiens
APPAHGVTS

SEQ ID NO: 130877 - protein, 9 aa, Homo sapiens
PPAHGVTSA

SEQ ID NO: 130878 - protein, 9 aa, Homo sapiens
PAHGVTSAP

SEQ ID NO: 130879 - protein, 9 aa, Homo sapiens
AHGVTSAPD

SEQ ID NO: 130880 - protein, 9 aa, Homo sapiens
HGVTSAPDT

SEQ ID NO: 130881 - protein, 9 aa, Homo sapiens
GVTSAPDTR

SEQ ID NO: 130882 - protein, 9 aa, Homo sapiens
VTSAPDTRP

SEQ ID NO: 130883 - protein, 9 aa, Homo sapiens
TSAPDTRPA

SEQ ID NO: 130884 - protein, 9 aa, Homo sapiens
SAPDTRPAP

SEQ ID NO: 130885 - protein, 9 aa, Homo sapiens
APDTRPAPG

SEQ ID NO: 130886 - protein, 9 aa, Homo sapiens
PDTRPAPGS

SEQ ID NO: 130887 - protein, 9 aa, Homo sapiens
DTRPAPGST

SEQ ID NO: 130888 - protein, 9 aa, Homo sapiens
TRPAPGSTA

SEQ ID NO: 130889 - protein, 9 aa, Homo sapiens
RPAPGSTAP

SEQ ID NO: 130890 - protein, 9 aa, Homo sapiens
PAPGSTAPP

SEQ ID NO: 130891 - protein, 9 aa, Homo sapiens
APGSTAPPA

SEQ ID NO: 130892 - protein, 9 aa, Homo sapiens
PGSTAPPAH

SEQ ID NO: 130893 - protein, 9 aa, Homo sapiens
GSTAPPAHG

SEQ ID NO: 130894 - protein, 9 aa, Homo sapiens
STAPPAHGV

SEQ ID NO: 130895 - protein, 9 aa, Homo sapiens
TAPPAHGVT

SEQ ID NO: 130896 - protein, 9 aa, Homo sapiens
APPAHGVTS

SEQ ID NO: 130897 - protein, 9 aa, Homo sapiens
PPAHGVTSA

SEQ ID NO: 130898 - protein, 9 aa, Homo sapiens
PAHGVTSAP

SEQ ID NO: 130899 - protein, 9 aa, Homo sapiens
AHGVTSAPD

SEQ ID NO: 130900 - protein, 9 aa, Homo sapiens
HGVTSAPDT

SEQ ID NO: 130901 - protein, 9 aa, Homo sapiens
GVTSAPDTR

SEQ ID NO: 130902 - protein, 9 aa, Homo sapiens
VTSAPDTRP

SEQ ID NO: 130903 - protein, 9 aa, Homo sapiens
TSAPDTRPA

SEQ ID NO: 130904 - protein, 9 aa, Homo sapiens
SAPDTRPAP

SEQ ID NO: 130905 - protein, 9 aa, Homo sapiens
APDTRPAPG

SEQ ID NO: 130906 - protein, 9 aa, Homo sapiens
PDTRPAPGS

SEQ ID NO: 130907 - protein, 9 aa, Homo sapiens
DTRPAPGST

SEQ ID NO: 130908 - protein, 9 aa, Homo sapiens
TRPAPGSTA

SEQ ID NO: 130909 - protein, 9 aa, Homo sapiens
RPAPGSTAP

SEQ ID NO: 130910 - protein, 9 aa, Homo sapiens
PAPGSTAPP

SEQ ID NO: 130911 - protein, 9 aa, Homo sapiens
APGSTAPPA

SEQ ID NO: 130912 - protein, 9 aa, Homo sapiens
PGSTAPPAH

SEQ ID NO: 130913 - protein, 9 aa, Homo sapiens
GSTAPPAHG

SEQ ID NO: 130914 - protein, 9 aa, Homo sapiens
STAPPAHGV

SEQ ID NO: 130915 - protein, 9 aa, Homo sapiens
TAPPAHGVT

SEQ ID NO: 130916 - protein, 9 aa, Homo sapiens
APPAHGVTS

SEQ ID NO: 130917 - protein, 9 aa, Homo sapiens
PPAHGVTSA

SEQ ID NO: 130918 - protein, 9 aa, Homo sapiens
PAHGVTSAP

SEQ ID NO: 130919 - protein, 9 aa, Homo sapiens
AHGVTSAPD

SEQ ID NO: 130920 - protein, 9 aa, Homo sapiens
HGVTSAPDT

SEQ ID NO: 130921 - protein, 9 aa, Homo sapiens
GVTSAPDTR

SEQ ID NO: 130922 - protein, 9 aa, Homo sapiens
VTSAPDTRP

SEQ ID NO: 130923 - protein, 9 aa, Homo sapiens
TSAPDTRPA

SEQ ID NO: 130924 - protein, 9 aa, Homo sapiens
SAPDTRPAP

SEQ ID NO: 130925 - protein, 9 aa, Homo sapiens
APDTRPAPG

SEQ ID NO: 130926 - protein, 9 aa, Homo sapiens
PDTRPAPGS

SEQ ID NO: 130927 - protein, 9 aa, Homo sapiens
DTRPAPGST

SEQ ID NO: 130928 - protein, 9 aa, Homo sapiens
TRPAPGSTA

SEQ ID NO: 130929 - protein, 9 aa, Homo sapiens
RPAPGSTAP

SEQ ID NO: 130930 - protein, 9 aa, Homo sapiens
PAPGSTAPP

SEQ ID NO: 130931 - protein, 9 aa, Homo sapiens
APGSTAPPA

SEQ ID NO: 130932 - protein, 9 aa, Homo sapiens
PGSTAPPAH

SEQ ID NO: 130933 - protein, 9 aa, Homo sapiens
GSTAPPAHG

SEQ ID NO: 130934 - protein, 9 aa, Homo sapiens
STAPPAHGV

SEQ ID NO: 130935 - protein, 9 aa, Homo sapiens
TAPPAHGVT

SEQ ID NO: 130936 - protein, 9 aa, Homo sapiens
APPAHGVTS

SEQ ID NO: 130937 - protein, 9 aa, Homo sapiens
PPAHGVTSA

SEQ ID NO: 130938 - protein, 9 aa, Homo sapiens
PAHGVTSAP

SEQ ID NO: 130939 - protein, 9 aa, Homo sapiens
AHGVTSAPD

SEQ ID NO: 130940 - protein, 9 aa, Homo sapiens
HGVTSAPDT

SEQ ID NO: 130941 - protein, 9 aa, Homo sapiens
GVTSAPDTR

SEQ ID NO: 130942 - protein, 9 aa, Homo sapiens
VTSAPDTRP

SEQ ID NO: 130943 - protein, 9 aa, Homo sapiens
TSAPDTRPA

SEQ ID NO: 130944 - protein, 9 aa, Homo sapiens
SAPDTRPAP

SEQ ID NO: 130945 - protein, 9 aa, Homo sapiens
APDTRPAPG

SEQ ID NO: 130946 - protein, 9 aa, Homo sapiens
PDTRPAPGS

SEQ ID NO: 130947 - protein, 9 aa, Homo sapiens
DTRPAPGST

SEQ ID NO: 130948 - protein, 9 aa, Homo sapiens
TRPAPGSTA

SEQ ID NO: 130949 - protein, 9 aa, Homo sapiens
RPAPGSTAP

SEQ ID NO: 130950 - protein, 9 aa, Homo sapiens
PAPGSTAPP

SEQ ID NO: 130951 - protein, 9 aa, Homo sapiens
APGSTAPPA

SEQ ID NO: 130952 - protein, 9 aa, Homo sapiens
PGSTAPPAH

SEQ ID NO: 130953 - protein, 9 aa, Homo sapiens
GSTAPPAHG

SEQ ID NO: 130954 - protein, 9 aa, Homo sapiens
STAPPAHGV

SEQ ID NO: 130955 - protein, 9 aa, Homo sapiens
TAPPAHGVT

SEQ ID NO: 130956 - protein, 9 aa, Homo sapiens
APPAHGVTS

SEQ ID NO: 130957 - protein, 9 aa, Homo sapiens
PPAHGVTSA

SEQ ID NO: 130958 - protein, 9 aa, Homo sapiens
PAHGVTSAP

SEQ ID NO: 130959 - protein, 9 aa, Homo sapiens
AHGVTSAPD

SEQ ID NO: 130960 - protein, 9 aa, Homo sapiens
HGVTSAPDT

SEQ ID NO: 130961 - protein, 9 aa, Homo sapiens
GVTSAPDTR

SEQ ID NO: 130962 - protein, 9 aa, Homo sapiens
VTSAPDTRP

SEQ ID NO: 130963 - protein, 9 aa, Homo sapiens
TSAPDTRPA

SEQ ID NO: 130964 - protein, 9 aa, Homo sapiens
SAPDTRPAP

SEQ ID NO: 130965 - protein, 9 aa, Homo sapiens
APDTRPAPG

SEQ ID NO: 130966 - protein, 9 aa, Homo sapiens
PDTRPAPGS

SEQ ID NO: 130967 - protein, 9 aa, Homo sapiens
DTRPAPGST

SEQ ID NO: 130968 - protein, 9 aa, Homo sapiens
TRPAPGSTA

SEQ ID NO: 130969 - protein, 9 aa, Homo sapiens
RPAPGSTAP

SEQ ID NO: 130970 - protein, 9 aa, Homo sapiens
PAPGSTAPP

SEQ ID NO: 130971 - protein, 9 aa, Homo sapiens
APGSTAPPA

SEQ ID NO: 130972 - protein, 9 aa, Homo sapiens
PGSTAPPAH

SEQ ID NO: 130973 - protein, 9 aa, Homo sapiens
GSTAPPAHG

SEQ ID NO: 130974 - protein, 9 aa, Homo sapiens
STAPPAHGV

SEQ ID NO: 130975 - protein, 9 aa, Homo sapiens
TAPPAHGVT

SEQ ID NO: 130976 - protein, 9 aa, Homo sapiens
APPAHGVTS

SEQ ID NO: 130977 - protein, 9 aa, Homo sapiens
PPAHGVTSA

SEQ ID NO: 130978 - protein, 9 aa, Homo sapiens
PAHGVTSAP

SEQ ID NO: 130979 - protein, 9 aa, Homo sapiens
AHGVTSAPD

SEQ ID NO: 130980 - protein, 9 aa, Homo sapiens
HGVTSAPDT

SEQ ID NO: 130981 - protein, 9 aa, Homo sapiens
GVTSAPDTR

SEQ ID NO: 130982 - protein, 9 aa, Homo sapiens
VTSAPDTRP

SEQ ID NO: 130983 - protein, 9 aa, Homo sapiens
TSAPDTRPA

SEQ ID NO: 130984 - protein, 9 aa, Homo sapiens
SAPDTRPAP

SEQ ID NO: 130985 - protein, 9 aa, Homo sapiens
APDTRPAPG

SEQ ID NO: 130986 - protein, 9 aa, Homo sapiens
PDTRPAPGS

SEQ ID NO: 130987 - protein, 9 aa, Homo sapiens
DTRPAPGST

SEQ ID NO: 130988 - protein, 9 aa, Homo sapiens
TRPAPGSTA

SEQ ID NO: 130989 - protein, 9 aa, Homo sapiens
RPAPGSTAP

SEQ ID NO: 130990 - protein, 9 aa, Homo sapiens
PAPGSTAPP

SEQ ID NO: 130991 - protein, 9 aa, Homo sapiens
APGSTAPPA

SEQ ID NO: 130992 - protein, 9 aa, Homo sapiens
PGSTAPPAH

SEQ ID NO: 130993 - protein, 9 aa, Homo sapiens
GSTAPPAHG

SEQ ID NO: 130994 - protein, 9 aa, Homo sapiens
STAPPAHGV

SEQ ID NO: 130995 - protein, 9 aa, Homo sapiens
TAPPAHGVT

SEQ ID NO: 130996 - protein, 9 aa, Homo sapiens
APPAHGVTS

SEQ ID NO: 130997 - protein, 9 aa, Homo sapiens
PPAHGVTSA

SEQ ID NO: 130998 - protein, 9 aa, Homo sapiens
PAHGVTSAP

SEQ ID NO: 130999 - protein, 9 aa, Homo sapiens
AHGVTSAPD

SEQ ID NO: 131000 - protein, 9 aa, Homo sapiens
HGVTSAPDT

SEQ ID NO: 131001 - protein, 9 aa, Homo sapiens
GVTSAPDTR

SEQ ID NO: 131002 - protein, 9 aa, Homo sapiens
VTSAPDTRP

SEQ ID NO: 131003 - protein, 9 aa, Homo sapiens
TSAPDTRPA

SEQ ID NO: 131004 - protein, 9 aa, Homo sapiens
SAPDTRPAP

SEQ ID NO: 131005 - protein, 9 aa, Homo sapiens
APDTRPAPG

SEQ ID NO: 131006 - protein, 9 aa, Homo sapiens
PDTRPAPGS

SEQ ID NO: 131007 - protein, 9 aa, Homo sapiens
DTRPAPGST

SEQ ID NO: 131008 - protein, 9 aa, Homo sapiens
TRPAPGSTA

SEQ ID NO: 131009 - protein, 9 aa, Homo sapiens
RPAPGSTAP

SEQ ID NO: 131010 - protein, 9 aa, Homo sapiens
PAPGSTAPP

SEQ ID NO: 131011 - protein, 9 aa, Homo sapiens
APGSTAPPA

SEQ ID NO: 131012 - protein, 9 aa, Homo sapiens
PGSTAPPAH

SEQ ID NO: 131013 - protein, 9 aa, Homo sapiens
GSTAPPAHG

SEQ ID NO: 131014 - protein, 9 aa, Homo sapiens
STAPPAHGV

SEQ ID NO: 131015 - protein, 9 aa, Homo sapiens
TAPPAHGVT

SEQ ID NO: 131016 - protein, 9 aa, Homo sapiens
APPAHGVTS

SEQ ID NO: 131017 - protein, 9 aa, Homo sapiens
PPAHGVTSA

SEQ ID NO: 131018 - protein, 9 aa, Homo sapiens
PAHGVTSAP

SEQ ID NO: 131019 - protein, 9 aa, Homo sapiens
AHGVTSAPD

SEQ ID NO: 131020 - protein, 9 aa, Homo sapiens
HGVTSAPDT

SEQ ID NO: 131021 - protein, 9 aa, Homo sapiens
GVTSAPDTR

SEQ ID NO: 131022 - protein, 9 aa, Homo sapiens
VTSAPDTRP

SEQ ID NO: 131023 - protein, 9 aa, Homo sapiens
TSAPDTRPA

SEQ ID NO: 131024 - protein, 9 aa, Homo sapiens
SAPDTRPAP

SEQ ID NO: 131025 - protein, 9 aa, Homo sapiens
APDTRPAPG

SEQ ID NO: 131026 - protein, 9 aa, Homo sapiens
PDTRPAPGS

SEQ ID NO: 131027 - protein, 9 aa, Homo sapiens
DTRPAPGST

SEQ ID NO: 131028 - protein, 9 aa, Homo sapiens
TRPAPGSTA

SEQ ID NO: 131029 - protein, 9 aa, Homo sapiens
RPAPGSTAP

SEQ ID NO: 131030 - protein, 9 aa, Homo sapiens
PAPGSTAPP

SEQ ID NO: 131031 - protein, 9 aa, Homo sapiens
APGSTAPPA

SEQ ID NO: 131032 - protein, 9 aa, Homo sapiens
PGSTAPPAH

SEQ ID NO: 131033 - protein, 9 aa, Homo sapiens
GSTAPPAHG

SEQ ID NO: 131034 - protein, 9 aa, Homo sapiens
STAPPAHGV

SEQ ID NO: 131035 - protein, 9 aa, Homo sapiens
TAPPAHGVT

SEQ ID NO: 131036 - protein, 9 aa, Homo sapiens
APPAHGVTS

SEQ ID NO: 131037 - protein, 9 aa, Homo sapiens
PPAHGVTSA

SEQ ID NO: 131038 - protein, 9 aa, Homo sapiens
PAHGVTSAP

SEQ ID NO: 131039 - protein, 9 aa, Homo sapiens
AHGVTSAPD

SEQ ID NO: 131040 - protein, 9 aa, Homo sapiens
HGVTSAPDN

SEQ ID NO: 131041 - protein, 9 aa, Homo sapiens
GVTSAPDNR

SEQ ID NO: 131042 - protein, 9 aa, Homo sapiens
VTSAPDNRP

SEQ ID NO: 131043 - protein, 9 aa, Homo sapiens
TSAPDNRPA

SEQ ID NO: 131044 - protein, 9 aa, Homo sapiens
SAPDNRPAL

SEQ ID NO: 131045 - protein, 9 aa, Homo sapiens
APDNRPALG

SEQ ID NO: 131046 - protein, 9 aa, Homo sapiens
PDNRPALGS

SEQ ID NO: 131047 - protein, 9 aa, Homo sapiens
DNRPALGST

SEQ ID NO: 131048 - protein, 9 aa, Homo sapiens
NRPALGSTA

SEQ ID NO: 131049 - protein, 9 aa, Homo sapiens
RPALGSTAP

SEQ ID NO: 131050 - protein, 9 aa, Homo sapiens
PALGSTAPP

SEQ ID NO: 131051 - protein, 9 aa, Homo sapiens
ALGSTAPPV

SEQ ID NO: 131052 - protein, 9 aa, Homo sapiens
LGSTAPPVH

SEQ ID NO: 131053 - protein, 9 aa, Homo sapiens
GSTAPPVHN

SEQ ID NO: 131054 - protein, 9 aa, Homo sapiens
STAPPVHNV

SEQ ID NO: 131055 - protein, 9 aa, Homo sapiens
TAPPVHNVT

SEQ ID NO: 131056 - protein, 9 aa, Homo sapiens
APPVHNVTS

SEQ ID NO: 131057 - protein, 9 aa, Homo sapiens
PPVHNVTSA

SEQ ID NO: 131058 - protein, 9 aa, Homo sapiens
PVHNVTSAS

SEQ ID NO: 131059 - protein, 9 aa, Homo sapiens
VHNVTSASG

SEQ ID NO: 131060 - protein, 9 aa, Homo sapiens
HNVTSASGS

SEQ ID NO: 131061 - protein, 9 aa, Homo sapiens
NVTSASGSA

SEQ ID NO: 131062 - protein, 9 aa, Homo sapiens
VTSASGSAS

SEQ ID NO: 131063 - protein, 9 aa, Homo sapiens
TSASGSASG

SEQ ID NO: 131064 - protein, 9 aa, Homo sapiens
SASGSASGS

SEQ ID NO: 131065 - protein, 9 aa, Homo sapiens
ASGSASGSA

SEQ ID NO: 131066 - protein, 9 aa, Homo sapiens
SGSASGSAS

SEQ ID NO: 131067 - protein, 9 aa, Homo sapiens
GSASGSAST

SEQ ID NO: 131068 - protein, 9 aa, Homo sapiens
SASGSASTL

SEQ ID NO: 131069 - protein, 9 aa, Homo sapiens
ASGSASTLV

SEQ ID NO: 131070 - protein, 9 aa, Homo sapiens
SGSASTLVH

SEQ ID NO: 131071 - protein, 9 aa, Homo sapiens
GSASTLVHN

SEQ ID NO: 131072 - protein, 9 aa, Homo sapiens
SASTLVHNG

SEQ ID NO: 131073 - protein, 9 aa, Homo sapiens
ASTLVHNGT

SEQ ID NO: 131074 - protein, 9 aa, Homo sapiens
STLVHNGTS

SEQ ID NO: 131075 - protein, 9 aa, Homo sapiens
TLVHNGTSA

SEQ ID NO: 131076 - protein, 9 aa, Homo sapiens
LVHNGTSAR

SEQ ID NO: 131077 - protein, 9 aa, Homo sapiens
VHNGTSARA

SEQ ID NO: 131078 - protein, 9 aa, Homo sapiens
HNGTSARAT

SEQ ID NO: 131079 - protein, 9 aa, Homo sapiens
NGTSARATT

SEQ ID NO: 131080 - protein, 9 aa, Homo sapiens
GTSARATTT

SEQ ID NO: 131081 - protein, 9 aa, Homo sapiens
TSARATTTP

SEQ ID NO: 131082 - protein, 9 aa, Homo sapiens
SARATTTPA

SEQ ID NO: 131083 - protein, 9 aa, Homo sapiens
ARATTTPAS

SEQ ID NO: 131084 - protein, 9 aa, Homo sapiens
RATTTPASK

SEQ ID NO: 131085 - protein, 9 aa, Homo sapiens
ATTTPASKS

SEQ ID NO: 131086 - protein, 9 aa, Homo sapiens
TTTPASKST

SEQ ID NO: 131087 - protein, 9 aa, Homo sapiens
TTPASKSTP

SEQ ID NO: 131088 - protein, 9 aa, Homo sapiens
TPASKSTPF

SEQ ID NO: 131089 - protein, 9 aa, Homo sapiens
PASKSTPFS

SEQ ID NO: 131090 - protein, 9 aa, Homo sapiens
ASKSTPFSI

SEQ ID NO: 131091 - protein, 9 aa, Homo sapiens
SKSTPFSIP

SEQ ID NO: 131092 - protein, 9 aa, Homo sapiens
KSTPFSIPS

SEQ ID NO: 131093 - protein, 9 aa, Homo sapiens
STPFSIPSH

SEQ ID NO: 131094 - protein, 9 aa, Homo sapiens
TPFSIPSHH

SEQ ID NO: 131095 - protein, 9 aa, Homo sapiens
PFSIPSHHS

SEQ ID NO: 131096 - protein, 9 aa, Homo sapiens
FSIPSHHSD

SEQ ID NO: 131097 - protein, 9 aa, Homo sapiens
SIPSHHSDT

SEQ ID NO: 131098 - protein, 9 aa, Homo sapiens
IPSHHSDTP

SEQ ID NO: 131099 - protein, 9 aa, Homo sapiens
PSHHSDTPT

SEQ ID NO: 131100 - protein, 9 aa, Homo sapiens
SHHSDTPTT

SEQ ID NO: 131101 - protein, 9 aa, Homo sapiens
HHSDTPTTL

SEQ ID NO: 131102 - protein, 9 aa, Homo sapiens
HSDTPTTLA

SEQ ID NO: 131103 - protein, 9 aa, Homo sapiens
SDTPTTLAS

SEQ ID NO: 131104 - protein, 9 aa, Homo sapiens
DTPTTLASH

SEQ ID NO: 131105 - protein, 9 aa, Homo sapiens
TPTTLASHS

SEQ ID NO: 131106 - protein, 9 aa, Homo sapiens
PTTLASHST

SEQ ID NO: 131107 - protein, 9 aa, Homo sapiens
TTLASHSTK

SEQ ID NO: 131108 - protein, 9 aa, Homo sapiens
TLASHSTKT

SEQ ID NO: 131109 - protein, 9 aa, Homo sapiens
LASHSTKTD

SEQ ID NO: 131110 - protein, 9 aa, Homo sapiens
ASHSTKTDA

SEQ ID NO: 131111 - protein, 9 aa, Homo sapiens
SHSTKTDAS

SEQ ID NO: 131112 - protein, 9 aa, Homo sapiens
HSTKTDASS

SEQ ID NO: 131113 - protein, 9 aa, Homo sapiens
STKTDASST

SEQ ID NO: 131114 - protein, 9 aa, Homo sapiens
TKTDASSTH

SEQ ID NO: 131115 - protein, 9 aa, Homo sapiens
KTDASSTHH

SEQ ID NO: 131116 - protein, 9 aa, Homo sapiens
TDASSTHHS

SEQ ID NO: 131117 - protein, 9 aa, Homo sapiens
DASSTHHSS

SEQ ID NO: 131118 - protein, 9 aa, Homo sapiens
ASSTHHSSV

SEQ ID NO: 131119 - protein, 9 aa, Homo sapiens
SSTHHSSVP

SEQ ID NO: 131120 - protein, 9 aa, Homo sapiens
STHHSSVPP

SEQ ID NO: 131121 - protein, 9 aa, Homo sapiens
THHSSVPPL

SEQ ID NO: 131122 - protein, 9 aa, Homo sapiens
HHSSVPPLT

SEQ ID NO: 131123 - protein, 9 aa, Homo sapiens
HSSVPPLTS

SEQ ID NO: 131124 - protein, 9 aa, Homo sapiens
SSVPPLTSS

SEQ ID NO: 131125 - protein, 9 aa, Homo sapiens
SVPPLTSSN

SEQ ID NO: 131126 - protein, 9 aa, Homo sapiens
VPPLTSSNH

SEQ ID NO: 131127 - protein, 9 aa, Homo sapiens
PPLTSSNHS

SEQ ID NO: 131128 - protein, 9 aa, Homo sapiens
PLTSSNHST

SEQ ID NO: 131129 - protein, 9 aa, Homo sapiens
LTSSNHSTS

SEQ ID NO: 131130 - protein, 9 aa, Homo sapiens
TSSNHSTSP

SEQ ID NO: 131131 - protein, 9 aa, Homo sapiens
SSNHSTSPQ

SEQ ID NO: 131132 - protein, 9 aa, Homo sapiens
SNHSTSPQL

SEQ ID NO: 131133 - protein, 9 aa, Homo sapiens
NHSTSPQLS

SEQ ID NO: 131134 - protein, 9 aa, Homo sapiens
HSTSPQLST

SEQ ID NO: 131135 - protein, 9 aa, Homo sapiens
STSPQLSTG

SEQ ID NO: 131136 - protein, 9 aa, Homo sapiens
TSPQLSTGV

SEQ ID NO: 131137 - protein, 9 aa, Homo sapiens
SPQLSTGVS

SEQ ID NO: 131138 - protein, 9 aa, Homo sapiens
PQLSTGVSF

SEQ ID NO: 131139 - protein, 9 aa, Homo sapiens
QLSTGVSFF

SEQ ID NO: 131140 - protein, 9 aa, Homo sapiens
LSTGVSFFF

SEQ ID NO: 131141 - protein, 9 aa, Homo sapiens
STGVSFFFL

SEQ ID NO: 131142 - protein, 9 aa, Homo sapiens
TGVSFFFLS

SEQ ID NO: 131143 - protein, 9 aa, Homo sapiens
GVSFFFLSF

SEQ ID NO: 131144 - protein, 9 aa, Homo sapiens
VSFFFLSFH

SEQ ID NO: 131145 - protein, 9 aa, Homo sapiens
SFFFLSFHI

SEQ ID NO: 131146 - protein, 9 aa, Homo sapiens
FFFLSFHIS

SEQ ID NO: 131147 - protein, 9 aa, Homo sapiens
FFLSFHISN

SEQ ID NO: 131148 - protein, 9 aa, Homo sapiens
FLSFHISNL

SEQ ID NO: 131149 - protein, 9 aa, Homo sapiens
LSFHISNLQ

SEQ ID NO: 131150 - protein, 9 aa, Homo sapiens
SFHISNLQF

SEQ ID NO: 131151 - protein, 9 aa, Homo sapiens
FHISNLQFN

SEQ ID NO: 131152 - protein, 9 aa, Homo sapiens
HISNLQFNS

SEQ ID NO: 131153 - protein, 9 aa, Homo sapiens
ISNLQFNSS

SEQ ID NO: 131154 - protein, 9 aa, Homo sapiens
SNLQFNSSL

SEQ ID NO: 131155 - protein, 9 aa, Homo sapiens
NLQFNSSLE

SEQ ID NO: 131156 - protein, 9 aa, Homo sapiens
LQFNSSLED

SEQ ID NO: 131157 - protein, 9 aa, Homo sapiens
QFNSSLEDP

SEQ ID NO: 131158 - protein, 9 aa, Homo sapiens
FNSSLEDPS

SEQ ID NO: 131159 - protein, 9 aa, Homo sapiens
NSSLEDPST

SEQ ID NO: 131160 - protein, 9 aa, Homo sapiens
SSLEDPSTD

SEQ ID NO: 131161 - protein, 9 aa, Homo sapiens
SLEDPSTDY

SEQ ID NO: 131162 - protein, 9 aa, Homo sapiens
LEDPSTDYY

SEQ ID NO: 131163 - protein, 9 aa, Homo sapiens
EDPSTDYYQ

SEQ ID NO: 131164 - protein, 9 aa, Homo sapiens
DPSTDYYQE

SEQ ID NO: 131165 - protein, 9 aa, Homo sapiens
PSTDYYQEL

SEQ ID NO: 131166 - protein, 9 aa, Homo sapiens
STDYYQELQ

SEQ ID NO: 131167 - protein, 9 aa, Homo sapiens
TDYYQELQR

SEQ ID NO: 131168 - protein, 9 aa, Homo sapiens
DYYQELQRD

SEQ ID NO: 131169 - protein, 9 aa, Homo sapiens
YYQELQRDI

SEQ ID NO: 131170 - protein, 9 aa, Homo sapiens
YQELQRDIS

SEQ ID NO: 131171 - protein, 9 aa, Homo sapiens
QELQRDISE

SEQ ID NO: 131172 - protein, 9 aa, Homo sapiens
ELQRDISEM

SEQ ID NO: 131173 - protein, 9 aa, Homo sapiens
LQRDISEMF

SEQ ID NO: 131174 - protein, 9 aa, Homo sapiens
QRDISEMFL

SEQ ID NO: 131175 - protein, 9 aa, Homo sapiens
RDISEMFLQ

SEQ ID NO: 131176 - protein, 9 aa, Homo sapiens
DISEMFLQI

SEQ ID NO: 131177 - protein, 9 aa, Homo sapiens
ISEMFLQIY

SEQ ID NO: 131178 - protein, 9 aa, Homo sapiens
SEMFLQIYK

SEQ ID NO: 131179 - protein, 9 aa, Homo sapiens
EMFLQIYKQ

SEQ ID NO: 131180 - protein, 9 aa, Homo sapiens
MFLQIYKQG

SEQ ID NO: 131181 - protein, 9 aa, Homo sapiens
FLQIYKQGG

SEQ ID NO: 131182 - protein, 9 aa, Homo sapiens
LQIYKQGGF

SEQ ID NO: 131183 - protein, 9 aa, Homo sapiens
QIYKQGGFL

SEQ ID NO: 131184 - protein, 9 aa, Homo sapiens
IYKQGGFLG

SEQ ID NO: 131185 - protein, 9 aa, Homo sapiens
YKQGGFLGL

SEQ ID NO: 131186 - protein, 9 aa, Homo sapiens
KQGGFLGLS

SEQ ID NO: 131187 - protein, 9 aa, Homo sapiens
QGGFLGLSN

SEQ ID NO: 131188 - protein, 9 aa, Homo sapiens
GGFLGLSNI

SEQ ID NO: 131189 - protein, 9 aa, Homo sapiens
GFLGLSNIK

SEQ ID NO: 131190 - protein, 9 aa, Homo sapiens
FLGLSNIKF

SEQ ID NO: 131191 - protein, 9 aa, Homo sapiens
LGLSNIKFR

SEQ ID NO: 131192 - protein, 9 aa, Homo sapiens
GLSNIKFRP

SEQ ID NO: 131193 - protein, 9 aa, Homo sapiens
LSNIKFRPG

SEQ ID NO: 131194 - protein, 9 aa, Homo sapiens
SNIKFRPGS

SEQ ID NO: 131195 - protein, 9 aa, Homo sapiens
NIKFRPGSV

SEQ ID NO: 131196 - protein, 9 aa, Homo sapiens
IKFRPGSVV

SEQ ID NO: 131197 - protein, 9 aa, Homo sapiens
KFRPGSVVV

SEQ ID NO: 131198 - protein, 9 aa, Homo sapiens
FRPGSVVVQ

SEQ ID NO: 131199 - protein, 9 aa, Homo sapiens
RPGSVVVQL

SEQ ID NO: 131200 - protein, 9 aa, Homo sapiens
PGSVVVQLT

SEQ ID NO: 131201 - protein, 9 aa, Homo sapiens
GSVVVQLTL

SEQ ID NO: 131202 - protein, 9 aa, Homo sapiens
SVVVQLTLA

SEQ ID NO: 131203 - protein, 9 aa, Homo sapiens
VVVQLTLAF

SEQ ID NO: 131204 - protein, 9 aa, Homo sapiens
VVQLTLAFR

SEQ ID NO: 131205 - protein, 9 aa, Homo sapiens
VQLTLAFRE

SEQ ID NO: 131206 - protein, 9 aa, Homo sapiens
QLTLAFREG

SEQ ID NO: 131207 - protein, 9 aa, Homo sapiens
LTLAFREGT

SEQ ID NO: 131208 - protein, 9 aa, Homo sapiens
TLAFREGTI

SEQ ID NO: 131209 - protein, 9 aa, Homo sapiens
LAFREGTIN

SEQ ID NO: 131210 - protein, 9 aa, Homo sapiens
AFREGTINV

SEQ ID NO: 131211 - protein, 9 aa, Homo sapiens
FREGTINVH

SEQ ID NO: 131212 - protein, 9 aa, Homo sapiens
REGTINVHD

SEQ ID NO: 131213 - protein, 9 aa, Homo sapiens
EGTINVHDV

SEQ ID NO: 131214 - protein, 9 aa, Homo sapiens
GTINVHDVE

SEQ ID NO: 131215 - protein, 9 aa, Homo sapiens
TINVHDVET

SEQ ID NO: 131216 - protein, 9 aa, Homo sapiens
INVHDVETQ

SEQ ID NO: 131217 - protein, 9 aa, Homo sapiens
NVHDVETQF

SEQ ID NO: 131218 - protein, 9 aa, Homo sapiens
VHDVETQFN

SEQ ID NO: 131219 - protein, 9 aa, Homo sapiens
HDVETQFNQ

SEQ ID NO: 131220 - protein, 9 aa, Homo sapiens
DVETQFNQY

SEQ ID NO: 131221 - protein, 9 aa, Homo sapiens
VETQFNQYK

SEQ ID NO: 131222 - protein, 9 aa, Homo sapiens
ETQFNQYKT

SEQ ID NO: 131223 - protein, 9 aa, Homo sapiens
TQFNQYKTE

SEQ ID NO: 131224 - protein, 9 aa, Homo sapiens
QFNQYKTEA

SEQ ID NO: 131225 - protein, 9 aa, Homo sapiens
FNQYKTEAA

SEQ ID NO: 131226 - protein, 9 aa, Homo sapiens
NQYKTEAAS

SEQ ID NO: 131227 - protein, 9 aa, Homo sapiens
QYKTEAASR

SEQ ID NO: 131228 - protein, 9 aa, Homo sapiens
YKTEAASRY

SEQ ID NO: 131229 - protein, 9 aa, Homo sapiens
KTEAASRYN

SEQ ID NO: 131230 - protein, 9 aa, Homo sapiens
TEAASRYNL

SEQ ID NO: 131231 - protein, 9 aa, Homo sapiens
EAASRYNLT

SEQ ID NO: 131232 - protein, 9 aa, Homo sapiens
AASRYNLTI

SEQ ID NO: 131233 - protein, 9 aa, Homo sapiens
ASRYNLTIS

SEQ ID NO: 131234 - protein, 9 aa, Homo sapiens
SRYNLTISD

SEQ ID NO: 131235 - protein, 9 aa, Homo sapiens
RYNLTISDV

SEQ ID NO: 131236 - protein, 9 aa, Homo sapiens
YNLTISDVS

SEQ ID NO: 131237 - protein, 9 aa, Homo sapiens
NLTISDVSV

SEQ ID NO: 131238 - protein, 9 aa, Homo sapiens
LTISDVSVS

SEQ ID NO: 131239 - protein, 9 aa, Homo sapiens
TISDVSVSD

SEQ ID NO: 131240 - protein, 9 aa, Homo sapiens
ISDVSVSDV

SEQ ID NO: 131241 - protein, 9 aa, Homo sapiens
SDVSVSDVP

SEQ ID NO: 131242 - protein, 9 aa, Homo sapiens
DVSVSDVPF

SEQ ID NO: 131243 - protein, 9 aa, Homo sapiens
VSVSDVPFP

SEQ ID NO: 131244 - protein, 9 aa, Homo sapiens
SVSDVPFPF

SEQ ID NO: 131245 - protein, 9 aa, Homo sapiens
VSDVPFPFS

SEQ ID NO: 131246 - protein, 9 aa, Homo sapiens
SDVPFPFSA

SEQ ID NO: 131247 - protein, 9 aa, Homo sapiens
DVPFPFSAQ

SEQ ID NO: 131248 - protein, 9 aa, Homo sapiens
VPFPFSAQS

SEQ ID NO: 131249 - protein, 9 aa, Homo sapiens
PFPFSAQSG

SEQ ID NO: 131250 - protein, 9 aa, Homo sapiens
FPFSAQSGA

SEQ ID NO: 131251 - protein, 9 aa, Homo sapiens
PFSAQSGAG

SEQ ID NO: 131252 - protein, 9 aa, Homo sapiens
FSAQSGAGV

SEQ ID NO: 131253 - protein, 9 aa, Homo sapiens
SAQSGAGVP

SEQ ID NO: 131254 - protein, 9 aa, Homo sapiens
AQSGAGVPG

SEQ ID NO: 131255 - protein, 9 aa, Homo sapiens
QSGAGVPGW

SEQ ID NO: 131256 - protein, 9 aa, Homo sapiens
SGAGVPGWG

SEQ ID NO: 131257 - protein, 9 aa, Homo sapiens
GAGVPGWGI

SEQ ID NO: 131258 - protein, 9 aa, Homo sapiens
AGVPGWGIA

SEQ ID NO: 131259 - protein, 9 aa, Homo sapiens
GVPGWGIAL

SEQ ID NO: 131260 - protein, 9 aa, Homo sapiens
VPGWGIALL

SEQ ID NO: 131261 - protein, 9 aa, Homo sapiens
PGWGIALLV

SEQ ID NO: 131262 - protein, 9 aa, Homo sapiens
GWGIALLVL

SEQ ID NO: 131263 - protein, 9 aa, Homo sapiens
WGIALLVLV

SEQ ID NO: 131264 - protein, 9 aa, Homo sapiens
GIALLVLVC

SEQ ID NO: 131265 - protein, 9 aa, Homo sapiens
IALLVLVCV

SEQ ID NO: 131266 - protein, 9 aa, Homo sapiens
ALLVLVCVL

SEQ ID NO: 131267 - protein, 9 aa, Homo sapiens
LLVLVCVLV

SEQ ID NO: 131268 - protein, 9 aa, Homo sapiens
LVLVCVLVA

SEQ ID NO: 131269 - protein, 9 aa, Homo sapiens
VLVCVLVAL

SEQ ID NO: 131270 - protein, 9 aa, Homo sapiens
LVCVLVALA

SEQ ID NO: 131271 - protein, 9 aa, Homo sapiens
VCVLVALAI

SEQ ID NO: 131272 - protein, 9 aa, Homo sapiens
CVLVALAIV

SEQ ID NO: 131273 - protein, 9 aa, Homo sapiens
VLVALAIVY

SEQ ID NO: 131274 - protein, 9 aa, Homo sapiens
LVALAIVYL

SEQ ID NO: 131275 - protein, 9 aa, Homo sapiens
VALAIVYLI

SEQ ID NO: 131276 - protein, 9 aa, Homo sapiens
ALAIVYLIA

SEQ ID NO: 131277 - protein, 9 aa, Homo sapiens
LAIVYLIAL

SEQ ID NO: 131278 - protein, 9 aa, Homo sapiens
AIVYLIALA

SEQ ID NO: 131279 - protein, 9 aa, Homo sapiens
IVYLIALAV

SEQ ID NO: 131280 - protein, 9 aa, Homo sapiens
VYLIALAVC

SEQ ID NO: 131281 - protein, 9 aa, Homo sapiens
YLIALAVCQ

SEQ ID NO: 131282 - protein, 9 aa, Homo sapiens
LIALAVCQC

SEQ ID NO: 131283 - protein, 9 aa, Homo sapiens
IALAVCQCR

SEQ ID NO: 131284 - protein, 9 aa, Homo sapiens
ALAVCQCRR

SEQ ID NO: 131285 - protein, 9 aa, Homo sapiens
LAVCQCRRK

SEQ ID NO: 131286 - protein, 9 aa, Homo sapiens
AVCQCRRKN

SEQ ID NO: 131287 - protein, 9 aa, Homo sapiens
VCQCRRKNY

SEQ ID NO: 131288 - protein, 9 aa, Homo sapiens
CQCRRKNYG

SEQ ID NO: 131289 - protein, 9 aa, Homo sapiens
QCRRKNYGQ

SEQ ID NO: 131290 - protein, 9 aa, Homo sapiens
CRRKNYGQL

SEQ ID NO: 131291 - protein, 9 aa, Homo sapiens
RRKNYGQLD

SEQ ID NO: 131292 - protein, 9 aa, Homo sapiens
RKNYGQLDI

SEQ ID NO: 131293 - protein, 9 aa, Homo sapiens
KNYGQLDIF

SEQ ID NO: 131294 - protein, 9 aa, Homo sapiens
NYGQLDIFP

SEQ ID NO: 131295 - protein, 9 aa, Homo sapiens
YGQLDIFPA

SEQ ID NO: 131296 - protein, 9 aa, Homo sapiens
GQLDIFPAR

SEQ ID NO: 131297 - protein, 9 aa, Homo sapiens
QLDIFPARD

SEQ ID NO: 131298 - protein, 9 aa, Homo sapiens
LDIFPARDT

SEQ ID NO: 131299 - protein, 9 aa, Homo sapiens
DIFPARDTY

SEQ ID NO: 131300 - protein, 9 aa, Homo sapiens
IFPARDTYH

SEQ ID NO: 131301 - protein, 9 aa, Homo sapiens
FPARDTYHP

SEQ ID NO: 131302 - protein, 9 aa, Homo sapiens
PARDTYHPM

SEQ ID NO: 131303 - protein, 9 aa, Homo sapiens
ARDTYHPMS

SEQ ID NO: 131304 - protein, 9 aa, Homo sapiens
RDTYHPMSE

SEQ ID NO: 131305 - protein, 9 aa, Homo sapiens
DTYHPMSEY

SEQ ID NO: 131306 - protein, 9 aa, Homo sapiens
TYHPMSEYP

SEQ ID NO: 131307 - protein, 9 aa, Homo sapiens
YHPMSEYPT

SEQ ID NO: 131308 - protein, 9 aa, Homo sapiens
HPMSEYPTY

SEQ ID NO: 131309 - protein, 9 aa, Homo sapiens
PMSEYPTYH

SEQ ID NO: 131310 - protein, 9 aa, Homo sapiens
MSEYPTYHT

SEQ ID NO: 131311 - protein, 9 aa, Homo sapiens
SEYPTYHTH

SEQ ID NO: 131312 - protein, 9 aa, Homo sapiens
EYPTYHTHG

SEQ ID NO: 131313 - protein, 9 aa, Homo sapiens
YPTYHTHGR

SEQ ID NO: 131314 - protein, 9 aa, Homo sapiens
PTYHTHGRY

SEQ ID NO: 131315 - protein, 9 aa, Homo sapiens
TYHTHGRYV

SEQ ID NO: 131316 - protein, 9 aa, Homo sapiens
YHTHGRYVP

SEQ ID NO: 131317 - protein, 9 aa, Homo sapiens
HTHGRYVPP

SEQ ID NO: 131318 - protein, 9 aa, Homo sapiens
THGRYVPPS

SEQ ID NO: 131319 - protein, 9 aa, Homo sapiens
HGRYVPPSS

SEQ ID NO: 131320 - protein, 9 aa, Homo sapiens
GRYVPPSST

SEQ ID NO: 131321 - protein, 9 aa, Homo sapiens
RYVPPSSTD

SEQ ID NO: 131322 - protein, 9 aa, Homo sapiens
YVPPSSTDR

SEQ ID NO: 131323 - protein, 9 aa, Homo sapiens
VPPSSTDRS

SEQ ID NO: 131324 - protein, 9 aa, Homo sapiens
PPSSTDRSP

SEQ ID NO: 131325 - protein, 9 aa, Homo sapiens
PSSTDRSPY

SEQ ID NO: 131326 - protein, 9 aa, Homo sapiens
SSTDRSPYE

SEQ ID NO: 131327 - protein, 9 aa, Homo sapiens
STDRSPYEK

SEQ ID NO: 131328 - protein, 9 aa, Homo sapiens
TDRSPYEKV

SEQ ID NO: 131329 - protein, 9 aa, Homo sapiens
DRSPYEKVS

SEQ ID NO: 131330 - protein, 9 aa, Homo sapiens
RSPYEKVSA

SEQ ID NO: 131331 - protein, 9 aa, Homo sapiens
SPYEKVSAG

SEQ ID NO: 131332 - protein, 9 aa, Homo sapiens
PYEKVSAGN

SEQ ID NO: 131333 - protein, 9 aa, Homo sapiens
YEKVSAGNG

SEQ ID NO: 131334 - protein, 9 aa, Homo sapiens
EKVSAGNGG

SEQ ID NO: 131335 - protein, 9 aa, Homo sapiens
KVSAGNGGS

SEQ ID NO: 131336 - protein, 9 aa, Homo sapiens
VSAGNGGSS

SEQ ID NO: 131337 - protein, 9 aa, Homo sapiens
SAGNGGSSL

SEQ ID NO: 131338 - protein, 9 aa, Homo sapiens
AGNGGSSLS

SEQ ID NO: 131339 - protein, 9 aa, Homo sapiens
GNGGSSLSY

SEQ ID NO: 131340 - protein, 9 aa, Homo sapiens
NGGSSLSYT

SEQ ID NO: 131341 - protein, 9 aa, Homo sapiens
GGSSLSYTN

SEQ ID NO: 131342 - protein, 9 aa, Homo sapiens
GSSLSYTNP

SEQ ID NO: 131343 - protein, 9 aa, Homo sapiens
SSLSYTNPA

SEQ ID NO: 131344 - protein, 9 aa, Homo sapiens
SLSYTNPAV

SEQ ID NO: 131345 - protein, 9 aa, Homo sapiens
LSYTNPAVA

SEQ ID NO: 131346 - protein, 9 aa, Homo sapiens
SYTNPAVAA

SEQ ID NO: 131347 - protein, 9 aa, Homo sapiens
YTNPAVAAA

SEQ ID NO: 131348 - protein, 9 aa, Homo sapiens
TNPAVAAAS

SEQ ID NO: 131349 - protein, 9 aa, Homo sapiens
NPAVAAASA

SEQ ID NO: 131350 - protein, 9 aa, Homo sapiens
PAVAAASAN

SEQ ID NO: 131351 - protein, 9 aa, Homo sapiens
AVAAASANL

SEQ ID NO: 131352 - protein, 9 aa, Homo sapiens
MSLEQKSQH

SEQ ID NO: 131353 - protein, 9 aa, Homo sapiens
SLEQKSQHC

SEQ ID NO: 131354 - protein, 9 aa, Homo sapiens
LEQKSQHCK

SEQ ID NO: 131355 - protein, 9 aa, Homo sapiens
EQKSQHCKP

SEQ ID NO: 131356 - protein, 9 aa, Homo sapiens
QKSQHCKPE

SEQ ID NO: 131357 - protein, 9 aa, Homo sapiens
KSQHCKPEE

SEQ ID NO: 131358 - protein, 9 aa, Homo sapiens
SQHCKPEEG

SEQ ID NO: 131359 - protein, 9 aa, Homo sapiens
QHCKPEEGL

SEQ ID NO: 131360 - protein, 9 aa, Homo sapiens
HCKPEEGLD

SEQ ID NO: 131361 - protein, 9 aa, Homo sapiens
CKPEEGLDT

SEQ ID NO: 131362 - protein, 9 aa, Homo sapiens
KPEEGLDTQ

SEQ ID NO: 131363 - protein, 9 aa, Homo sapiens
PEEGLDTQE

SEQ ID NO: 131364 - protein, 9 aa, Homo sapiens
EEGLDTQEE

SEQ ID NO: 131365 - protein, 9 aa, Homo sapiens
EGLDTQEEA

SEQ ID NO: 131366 - protein, 9 aa, Homo sapiens
GLDTQEEAL

SEQ ID NO: 131367 - protein, 9 aa, Homo sapiens
LDTQEEALG

SEQ ID NO: 131368 - protein, 9 aa, Homo sapiens
DTQEEALGL

SEQ ID NO: 131369 - protein, 9 aa, Homo sapiens
TQEEALGLV

SEQ ID NO: 131370 - protein, 9 aa, Homo sapiens
QEEALGLVG

SEQ ID NO: 131371 - protein, 9 aa, Homo sapiens
EEALGLVGV

SEQ ID NO: 131372 - protein, 9 aa, Homo sapiens
EALGLVGVQ

SEQ ID NO: 131373 - protein, 9 aa, Homo sapiens
ALGLVGVQA

SEQ ID NO: 131374 - protein, 9 aa, Homo sapiens
LGLVGVQAA

SEQ ID NO: 131375 - protein, 9 aa, Homo sapiens
GLVGVQAAT

SEQ ID NO: 131376 - protein, 9 aa, Homo sapiens
LVGVQAATT

SEQ ID NO: 131377 - protein, 9 aa, Homo sapiens
VGVQAATTE

SEQ ID NO: 131378 - protein, 9 aa, Homo sapiens
GVQAATTEE

SEQ ID NO: 131379 - protein, 9 aa, Homo sapiens
VQAATTEEQ

SEQ ID NO: 131380 - protein, 9 aa, Homo sapiens
QAATTEEQE

SEQ ID NO: 131381 - protein, 9 aa, Homo sapiens
AATTEEQEA

SEQ ID NO: 131382 - protein, 9 aa, Homo sapiens
ATTEEQEAV

SEQ ID NO: 131383 - protein, 9 aa, Homo sapiens
TTEEQEAVS

SEQ ID NO: 131384 - protein, 9 aa, Homo sapiens
TEEQEAVSS

SEQ ID NO: 131385 - protein, 9 aa, Homo sapiens
EEQEAVSSS

SEQ ID NO: 131386 - protein, 9 aa, Homo sapiens
EQEAVSSSS

SEQ ID NO: 131387 - protein, 9 aa, Homo sapiens
QEAVSSSSP

SEQ ID NO: 131388 - protein, 9 aa, Homo sapiens
EAVSSSSPL

SEQ ID NO: 131389 - protein, 9 aa, Homo sapiens
AVSSSSPLV

SEQ ID NO: 131390 - protein, 9 aa, Homo sapiens
VSSSSPLVP

SEQ ID NO: 131391 - protein, 9 aa, Homo sapiens
SSSSPLVPG

SEQ ID NO: 131392 - protein, 9 aa, Homo sapiens
SSSPLVPGT

SEQ ID NO: 131393 - protein, 9 aa, Homo sapiens
SSPLVPGTL

SEQ ID NO: 131394 - protein, 9 aa, Homo sapiens
SPLVPGTLG

SEQ ID NO: 131395 - protein, 9 aa, Homo sapiens
PLVPGTLGE

SEQ ID NO: 131396 - protein, 9 aa, Homo sapiens
LVPGTLGEV

SEQ ID NO: 131397 - protein, 9 aa, Homo sapiens
VPGTLGEVP

SEQ ID NO: 131398 - protein, 9 aa, Homo sapiens
PGTLGEVPA

SEQ ID NO: 131399 - protein, 9 aa, Homo sapiens
GTLGEVPAA

SEQ ID NO: 131400 - protein, 9 aa, Homo sapiens
TLGEVPAAG

SEQ ID NO: 131401 - protein, 9 aa, Homo sapiens
LGEVPAAGS

SEQ ID NO: 131402 - protein, 9 aa, Homo sapiens
GEVPAAGSP

SEQ ID NO: 131403 - protein, 9 aa, Homo sapiens
EVPAAGSPG

SEQ ID NO: 131404 - protein, 9 aa, Homo sapiens
VPAAGSPGP

SEQ ID NO: 131405 - protein, 9 aa, Homo sapiens
PAAGSPGPL

SEQ ID NO: 131406 - protein, 9 aa, Homo sapiens
AAGSPGPLK

SEQ ID NO: 131407 - protein, 9 aa, Homo sapiens
AGSPGPLKS

SEQ ID NO: 131408 - protein, 9 aa, Homo sapiens
GSPGPLKSP

SEQ ID NO: 131409 - protein, 9 aa, Homo sapiens
SPGPLKSPQ

SEQ ID NO: 131410 - protein, 9 aa, Homo sapiens
PGPLKSPQG

SEQ ID NO: 131411 - protein, 9 aa, Homo sapiens
GPLKSPQGA

SEQ ID NO: 131412 - protein, 9 aa, Homo sapiens
PLKSPQGAS

SEQ ID NO: 131413 - protein, 9 aa, Homo sapiens
LKSPQGASA

SEQ ID NO: 131414 - protein, 9 aa, Homo sapiens
KSPQGASAI

SEQ ID NO: 131415 - protein, 9 aa, Homo sapiens
SPQGASAIP

SEQ ID NO: 131416 - protein, 9 aa, Homo sapiens
PQGASAIPT

SEQ ID NO: 131417 - protein, 9 aa, Homo sapiens
QGASAIPTA

SEQ ID NO: 131418 - protein, 9 aa, Homo sapiens
GASAIPTAI

SEQ ID NO: 131419 - protein, 9 aa, Homo sapiens
ASAIPTAID

SEQ ID NO: 131420 - protein, 9 aa, Homo sapiens
SAIPTAIDF

SEQ ID NO: 131421 - protein, 9 aa, Homo sapiens
AIPTAIDFT

SEQ ID NO: 131422 - protein, 9 aa, Homo sapiens
IPTAIDFTL

SEQ ID NO: 131423 - protein, 9 aa, Homo sapiens
PTAIDFTLW

SEQ ID NO: 131424 - protein, 9 aa, Homo sapiens
TAIDFTLWR

SEQ ID NO: 131425 - protein, 9 aa, Homo sapiens
AIDFTLWRQ

SEQ ID NO: 131426 - protein, 9 aa, Homo sapiens
IDFTLWRQS

SEQ ID NO: 131427 - protein, 9 aa, Homo sapiens
DFTLWRQSI

SEQ ID NO: 131428 - protein, 9 aa, Homo sapiens
FTLWRQSIK

SEQ ID NO: 131429 - protein, 9 aa, Homo sapiens
TLWRQSIKG

SEQ ID NO: 131430 - protein, 9 aa, Homo sapiens
LWRQSIKGS

SEQ ID NO: 131431 - protein, 9 aa, Homo sapiens
WRQSIKGSS

SEQ ID NO: 131432 - protein, 9 aa, Homo sapiens
RQSIKGSSN

SEQ ID NO: 131433 - protein, 9 aa, Homo sapiens
QSIKGSSNQ

SEQ ID NO: 131434 - protein, 9 aa, Homo sapiens
SIKGSSNQE

SEQ ID NO: 131435 - protein, 9 aa, Homo sapiens
IKGSSNQEE

SEQ ID NO: 131436 - protein, 9 aa, Homo sapiens
KGSSNQEEE

SEQ ID NO: 131437 - protein, 9 aa, Homo sapiens
GSSNQEEEG

SEQ ID NO: 131438 - protein, 9 aa, Homo sapiens
SSNQEEEGP

SEQ ID NO: 131439 - protein, 9 aa, Homo sapiens
SNQEEEGPS

SEQ ID NO: 131440 - protein, 9 aa, Homo sapiens
NQEEEGPST

SEQ ID NO: 131441 - protein, 9 aa, Homo sapiens
QEEEGPSTS

SEQ ID NO: 131442 - protein, 9 aa, Homo sapiens
EEEGPSTSP

SEQ ID NO: 131443 - protein, 9 aa, Homo sapiens
EEGPSTSPD

SEQ ID NO: 131444 - protein, 9 aa, Homo sapiens
EGPSTSPDP

SEQ ID NO: 131445 - protein, 9 aa, Homo sapiens
GPSTSPDPE

SEQ ID NO: 131446 - protein, 9 aa, Homo sapiens
PSTSPDPES

SEQ ID NO: 131447 - protein, 9 aa, Homo sapiens
STSPDPESV

SEQ ID NO: 131448 - protein, 9 aa, Homo sapiens
TSPDPESVF

SEQ ID NO: 131449 - protein, 9 aa, Homo sapiens
SPDPESVFR

SEQ ID NO: 131450 - protein, 9 aa, Homo sapiens
PDPESVFRA

SEQ ID NO: 131451 - protein, 9 aa, Homo sapiens
DPESVFRAA

SEQ ID NO: 131452 - protein, 9 aa, Homo sapiens
PESVFRAAL

SEQ ID NO: 131453 - protein, 9 aa, Homo sapiens
ESVFRAALS

SEQ ID NO: 131454 - protein, 9 aa, Homo sapiens
SVFRAALSK

SEQ ID NO: 131455 - protein, 9 aa, Homo sapiens
VFRAALSKK

SEQ ID NO: 131456 - protein, 9 aa, Homo sapiens
FRAALSKKV

SEQ ID NO: 131457 - protein, 9 aa, Homo sapiens
RAALSKKVA

SEQ ID NO: 131458 - protein, 9 aa, Homo sapiens
AALSKKVAD

SEQ ID NO: 131459 - protein, 9 aa, Homo sapiens
ALSKKVADL

SEQ ID NO: 131460 - protein, 9 aa, Homo sapiens
LSKKVADLI

SEQ ID NO: 131461 - protein, 9 aa, Homo sapiens
SKKVADLIH

SEQ ID NO: 131462 - protein, 9 aa, Homo sapiens
KKVADLIHF

SEQ ID NO: 131463 - protein, 9 aa, Homo sapiens
KVADLIHFL

SEQ ID NO: 131464 - protein, 9 aa, Homo sapiens
VADLIHFLL

SEQ ID NO: 131465 - protein, 9 aa, Homo sapiens
ADLIHFLLL

SEQ ID NO: 131466 - protein, 9 aa, Homo sapiens
DLIHFLLLK

SEQ ID NO: 131467 - protein, 9 aa, Homo sapiens
LIHFLLLKY

SEQ ID NO: 131468 - protein, 9 aa, Homo sapiens
MEEPQSDPS

SEQ ID NO: 131469 - protein, 9 aa, Homo sapiens
EEPQSDPSV

SEQ ID NO: 131470 - protein, 9 aa, Homo sapiens
EPQSDPSVE

SEQ ID NO: 131471 - protein, 9 aa, Homo sapiens
PQSDPSVEP

SEQ ID NO: 131472 - protein, 9 aa, Homo sapiens
QSDPSVEPP

SEQ ID NO: 131473 - protein, 9 aa, Homo sapiens
SDPSVEPPL

SEQ ID NO: 131474 - protein, 9 aa, Homo sapiens
DPSVEPPLS

SEQ ID NO: 131475 - protein, 9 aa, Homo sapiens
PSVEPPLSQ

SEQ ID NO: 131476 - protein, 9 aa, Homo sapiens
SVEPPLSQE

SEQ ID NO: 131477 - protein, 9 aa, Homo sapiens
VEPPLSQET

SEQ ID NO: 131478 - protein, 9 aa, Homo sapiens
EPPLSQETF

SEQ ID NO: 131479 - protein, 9 aa, Homo sapiens
PPLSQETFS

SEQ ID NO: 131480 - protein, 9 aa, Homo sapiens
PLSQETFSD

SEQ ID NO: 131481 - protein, 9 aa, Homo sapiens
LSQETFSDL

SEQ ID NO: 131482 - protein, 9 aa, Homo sapiens
SQETFSDLW

SEQ ID NO: 131483 - protein, 9 aa, Homo sapiens
QETFSDLWK

SEQ ID NO: 131484 - protein, 9 aa, Homo sapiens
ETFSDLWKL

SEQ ID NO: 131485 - protein, 9 aa, Homo sapiens
TFSDLWKLL

SEQ ID NO: 131486 - protein, 9 aa, Homo sapiens
FSDLWKLLP

SEQ ID NO: 131487 - protein, 9 aa, Homo sapiens
SDLWKLLPE

SEQ ID NO: 131488 - protein, 9 aa, Homo sapiens
DLWKLLPEN

SEQ ID NO: 131489 - protein, 9 aa, Homo sapiens
LWKLLPENN

SEQ ID NO: 131490 - protein, 9 aa, Homo sapiens
WKLLPENNV

SEQ ID NO: 131491 - protein, 9 aa, Homo sapiens
KLLPENNVL

SEQ ID NO: 131492 - protein, 9 aa, Homo sapiens
LLPENNVLS

SEQ ID NO: 131493 - protein, 9 aa, Homo sapiens
LPENNVLSP

SEQ ID NO: 131494 - protein, 9 aa, Homo sapiens
PENNVLSPL

SEQ ID NO: 131495 - protein, 9 aa, Homo sapiens
ENNVLSPLP

SEQ ID NO: 131496 - protein, 9 aa, Homo sapiens
NNVLSPLPS

SEQ ID NO: 131497 - protein, 9 aa, Homo sapiens
NVLSPLPSQ

SEQ ID NO: 131498 - protein, 9 aa, Homo sapiens
VLSPLPSQA

SEQ ID NO: 131499 - protein, 9 aa, Homo sapiens
LSPLPSQAM

SEQ ID NO: 131500 - protein, 9 aa, Homo sapiens
SPLPSQAMD

SEQ ID NO: 131501 - protein, 9 aa, Homo sapiens
PLPSQAMDD

SEQ ID NO: 131502 - protein, 9 aa, Homo sapiens
LPSQAMDDL

SEQ ID NO: 131503 - protein, 9 aa, Homo sapiens
PSQAMDDLM

SEQ ID NO: 131504 - protein, 9 aa, Homo sapiens
SQAMDDLML

SEQ ID NO: 131505 - protein, 9 aa, Homo sapiens
QAMDDLMLS

SEQ ID NO: 131506 - protein, 9 aa, Homo sapiens
AMDDLMLSP

SEQ ID NO: 131507 - protein, 9 aa, Homo sapiens
MDDLMLSPD

SEQ ID NO: 131508 - protein, 9 aa, Homo sapiens
DDLMLSPDD

SEQ ID NO: 131509 - protein, 9 aa, Homo sapiens
DLMLSPDDI

SEQ ID NO: 131510 - protein, 9 aa, Homo sapiens
LMLSPDDIE

SEQ ID NO: 131511 - protein, 9 aa, Homo sapiens
MLSPDDIEQ

SEQ ID NO: 131512 - protein, 9 aa, Homo sapiens
LSPDDIEQW

SEQ ID NO: 131513 - protein, 9 aa, Homo sapiens
SPDDIEQWF

SEQ ID NO: 131514 - protein, 9 aa, Homo sapiens
PDDIEQWFT

SEQ ID NO: 131515 - protein, 9 aa, Homo sapiens
DDIEQWFTE

SEQ ID NO: 131516 - protein, 9 aa, Homo sapiens
DIEQWFTED

SEQ ID NO: 131517 - protein, 9 aa, Homo sapiens
IEQWFTEDP

SEQ ID NO: 131518 - protein, 9 aa, Homo sapiens
EQWFTEDPG

SEQ ID NO: 131519 - protein, 9 aa, Homo sapiens
QWFTEDPGP

SEQ ID NO: 131520 - protein, 9 aa, Homo sapiens
WFTEDPGPD

SEQ ID NO: 131521 - protein, 9 aa, Homo sapiens
FTEDPGPDE

SEQ ID NO: 131522 - protein, 9 aa, Homo sapiens
TEDPGPDEA

SEQ ID NO: 131523 - protein, 9 aa, Homo sapiens
EDPGPDEAP

SEQ ID NO: 131524 - protein, 9 aa, Homo sapiens
DPGPDEAPR

SEQ ID NO: 131525 - protein, 9 aa, Homo sapiens
PGPDEAPRM

SEQ ID NO: 131526 - protein, 9 aa, Homo sapiens
GPDEAPRMP

SEQ ID NO: 131527 - protein, 9 aa, Homo sapiens
PDEAPRMPE

SEQ ID NO: 131528 - protein, 9 aa, Homo sapiens
DEAPRMPEA

SEQ ID NO: 131529 - protein, 9 aa, Homo sapiens
EAPRMPEAA

SEQ ID NO: 131530 - protein, 9 aa, Homo sapiens
APRMPEAAP

SEQ ID NO: 131531 - protein, 9 aa, Homo sapiens
PRMPEAAPR

SEQ ID NO: 131532 - protein, 9 aa, Homo sapiens
RMPEAAPRV

SEQ ID NO: 131533 - protein, 9 aa, Homo sapiens
MPEAAPRVA

SEQ ID NO: 131534 - protein, 9 aa, Homo sapiens
PEAAPRVAP

SEQ ID NO: 131535 - protein, 9 aa, Homo sapiens
EAAPRVAPA

SEQ ID NO: 131536 - protein, 9 aa, Homo sapiens
AAPRVAPAP

SEQ ID NO: 131537 - protein, 9 aa, Homo sapiens
APRVAPAPA

SEQ ID NO: 131538 - protein, 9 aa, Homo sapiens
PRVAPAPAA

SEQ ID NO: 131539 - protein, 9 aa, Homo sapiens
RVAPAPAAP

SEQ ID NO: 131540 - protein, 9 aa, Homo sapiens
VAPAPAAPT

SEQ ID NO: 131541 - protein, 9 aa, Homo sapiens
APAPAAPTP

SEQ ID NO: 131542 - protein, 9 aa, Homo sapiens
PAPAAPTPA

SEQ ID NO: 131543 - protein, 9 aa, Homo sapiens
APAAPTPAA

SEQ ID NO: 131544 - protein, 9 aa, Homo sapiens
PAAPTPAAP

SEQ ID NO: 131545 - protein, 9 aa, Homo sapiens
AAPTPAAPA

SEQ ID NO: 131546 - protein, 9 aa, Homo sapiens
APTPAAPAP

SEQ ID NO: 131547 - protein, 9 aa, Homo sapiens
PTPAAPAPA

SEQ ID NO: 131548 - protein, 9 aa, Homo sapiens
TPAAPAPAP

SEQ ID NO: 131549 - protein, 9 aa, Homo sapiens
PAAPAPAPS

SEQ ID NO: 131550 - protein, 9 aa, Homo sapiens
AAPAPAPSW

SEQ ID NO: 131551 - protein, 9 aa, Homo sapiens
APAPAPSWP

SEQ ID NO: 131552 - protein, 9 aa, Homo sapiens
PAPAPSWPL

SEQ ID NO: 131553 - protein, 9 aa, Homo sapiens
APAPSWPLS

SEQ ID NO: 131554 - protein, 9 aa, Homo sapiens
PAPSWPLSS

SEQ ID NO: 131555 - protein, 9 aa, Homo sapiens
APSWPLSSS

SEQ ID NO: 131556 - protein, 9 aa, Homo sapiens
PSWPLSSSV

SEQ ID NO: 131557 - protein, 9 aa, Homo sapiens
SWPLSSSVP

SEQ ID NO: 131558 - protein, 9 aa, Homo sapiens
WPLSSSVPS

SEQ ID NO: 131559 - protein, 9 aa, Homo sapiens
PLSSSVPSQ

SEQ ID NO: 131560 - protein, 9 aa, Homo sapiens
LSSSVPSQK

SEQ ID NO: 131561 - protein, 9 aa, Homo sapiens
SSSVPSQKT

SEQ ID NO: 131562 - protein, 9 aa, Homo sapiens
SSVPSQKTY

SEQ ID NO: 131563 - protein, 9 aa, Homo sapiens
SVPSQKTYQ

SEQ ID NO: 131564 - protein, 9 aa, Homo sapiens
VPSQKTYQG

SEQ ID NO: 131565 - protein, 9 aa, Homo sapiens
PSQKTYQGS

SEQ ID NO: 131566 - protein, 9 aa, Homo sapiens
SQKTYQGSY

SEQ ID NO: 131567 - protein, 9 aa, Homo sapiens
QKTYQGSYG

SEQ ID NO: 131568 - protein, 9 aa, Homo sapiens
KTYQGSYGF

SEQ ID NO: 131569 - protein, 9 aa, Homo sapiens
TYQGSYGFR

SEQ ID NO: 131570 - protein, 9 aa, Homo sapiens
YQGSYGFRL

SEQ ID NO: 131571 - protein, 9 aa, Homo sapiens
QGSYGFRLG

SEQ ID NO: 131572 - protein, 9 aa, Homo sapiens
GSYGFRLGF

SEQ ID NO: 131573 - protein, 9 aa, Homo sapiens
SYGFRLGFL

SEQ ID NO: 131574 - protein, 9 aa, Homo sapiens
YGFRLGFLH

SEQ ID NO: 131575 - protein, 9 aa, Homo sapiens
GFRLGFLHS

SEQ ID NO: 131576 - protein, 9 aa, Homo sapiens
FRLGFLHSG

SEQ ID NO: 131577 - protein, 9 aa, Homo sapiens
RLGFLHSGT

SEQ ID NO: 131578 - protein, 9 aa, Homo sapiens
LGFLHSGTA

SEQ ID NO: 131579 - protein, 9 aa, Homo sapiens
GFLHSGTAK

SEQ ID NO: 131580 - protein, 9 aa, Homo sapiens
FLHSGTAKS

SEQ ID NO: 131581 - protein, 9 aa, Homo sapiens
LHSGTAKSV

SEQ ID NO: 131582 - protein, 9 aa, Homo sapiens
HSGTAKSVT

SEQ ID NO: 131583 - protein, 9 aa, Homo sapiens
SGTAKSVTC

SEQ ID NO: 131584 - protein, 9 aa, Homo sapiens
GTAKSVTCT

SEQ ID NO: 131585 - protein, 9 aa, Homo sapiens
TAKSVTCTY

SEQ ID NO: 131586 - protein, 9 aa, Homo sapiens
AKSVTCTYS

SEQ ID NO: 131587 - protein, 9 aa, Homo sapiens
KSVTCTYSP

SEQ ID NO: 131588 - protein, 9 aa, Homo sapiens
SVTCTYSPA

SEQ ID NO: 131589 - protein, 9 aa, Homo sapiens
VTCTYSPAL

SEQ ID NO: 131590 - protein, 9 aa, Homo sapiens
TCTYSPALN

SEQ ID NO: 131591 - protein, 9 aa, Homo sapiens
CTYSPALNK

SEQ ID NO: 131592 - protein, 9 aa, Homo sapiens
TYSPALNKM

SEQ ID NO: 131593 - protein, 9 aa, Homo sapiens
YSPALNKMF

SEQ ID NO: 131594 - protein, 9 aa, Homo sapiens
SPALNKMFC

SEQ ID NO: 131595 - protein, 9 aa, Homo sapiens
PALNKMFCQ

SEQ ID NO: 131596 - protein, 9 aa, Homo sapiens
ALNKMFCQL

SEQ ID NO: 131597 - protein, 9 aa, Homo sapiens
LNKMFCQLA

SEQ ID NO: 131598 - protein, 9 aa, Homo sapiens
NKMFCQLAK

SEQ ID NO: 131599 - protein, 9 aa, Homo sapiens
KMFCQLAKT

SEQ ID NO: 131600 - protein, 9 aa, Homo sapiens
MFCQLAKTC

SEQ ID NO: 131601 - protein, 9 aa, Homo sapiens
FCQLAKTCP

SEQ ID NO: 131602 - protein, 9 aa, Homo sapiens
CQLAKTCPV

SEQ ID NO: 131603 - protein, 9 aa, Homo sapiens
QLAKTCPVQ

SEQ ID NO: 131604 - protein, 9 aa, Homo sapiens
LAKTCPVQL

SEQ ID NO: 131605 - protein, 9 aa, Homo sapiens
AKTCPVQLW

SEQ ID NO: 131606 - protein, 9 aa, Homo sapiens
KTCPVQLWV

SEQ ID NO: 131607 - protein, 9 aa, Homo sapiens
TCPVQLWVD

SEQ ID NO: 131608 - protein, 9 aa, Homo sapiens
CPVQLWVDS

SEQ ID NO: 131609 - protein, 9 aa, Homo sapiens
PVQLWVDST

SEQ ID NO: 131610 - protein, 9 aa, Homo sapiens
VQLWVDSTP

SEQ ID NO: 131611 - protein, 9 aa, Homo sapiens
QLWVDSTPP

SEQ ID NO: 131612 - protein, 9 aa, Homo sapiens
LWVDSTPPP

SEQ ID NO: 131613 - protein, 9 aa, Homo sapiens
WVDSTPPPG

SEQ ID NO: 131614 - protein, 9 aa, Homo sapiens
VDSTPPPGT

SEQ ID NO: 131615 - protein, 9 aa, Homo sapiens
DSTPPPGTR

SEQ ID NO: 131616 - protein, 9 aa, Homo sapiens
STPPPGTRV

SEQ ID NO: 131617 - protein, 9 aa, Homo sapiens
TPPPGTRVR

SEQ ID NO: 131618 - protein, 9 aa, Homo sapiens
PPPGTRVRA

SEQ ID NO: 131619 - protein, 9 aa, Homo sapiens
PPGTRVRAM

SEQ ID NO: 131620 - protein, 9 aa, Homo sapiens
PGTRVRAMA

SEQ ID NO: 131621 - protein, 9 aa, Homo sapiens
GTRVRAMAI

SEQ ID NO: 131622 - protein, 9 aa, Homo sapiens
TRVRAMAIY

SEQ ID NO: 131623 - protein, 9 aa, Homo sapiens
RVRAMAIYK

SEQ ID NO: 131624 - protein, 9 aa, Homo sapiens
VRAMAIYKQ

SEQ ID NO: 131625 - protein, 9 aa, Homo sapiens
RAMAIYKQS

SEQ ID NO: 131626 - protein, 9 aa, Homo sapiens
AMAIYKQSQ

SEQ ID NO: 131627 - protein, 9 aa, Homo sapiens
MAIYKQSQH

SEQ ID NO: 131628 - protein, 9 aa, Homo sapiens
AIYKQSQHM

SEQ ID NO: 131629 - protein, 9 aa, Homo sapiens
IYKQSQHMT

SEQ ID NO: 131630 - protein, 9 aa, Homo sapiens
YKQSQHMTE

SEQ ID NO: 131631 - protein, 9 aa, Homo sapiens
KQSQHMTEV

SEQ ID NO: 131632 - protein, 9 aa, Homo sapiens
QSQHMTEVV

SEQ ID NO: 131633 - protein, 9 aa, Homo sapiens
SQHMTEVVR

SEQ ID NO: 131634 - protein, 9 aa, Homo sapiens
QHMTEVVRR

SEQ ID NO: 131635 - protein, 9 aa, Homo sapiens
HMTEVVRRC

SEQ ID NO: 131636 - protein, 9 aa, Homo sapiens
MTEVVRRCP

SEQ ID NO: 131637 - protein, 9 aa, Homo sapiens
TEVVRRCPH

SEQ ID NO: 131638 - protein, 9 aa, Homo sapiens
EVVRRCPHH

SEQ ID NO: 131639 - protein, 9 aa, Homo sapiens
VVRRCPHHE

SEQ ID NO: 131640 - protein, 9 aa, Homo sapiens
VRRCPHHER

SEQ ID NO: 131641 - protein, 9 aa, Homo sapiens
RRCPHHERC

SEQ ID NO: 131642 - protein, 9 aa, Homo sapiens
RCPHHERCS

SEQ ID NO: 131643 - protein, 9 aa, Homo sapiens
CPHHERCSD

SEQ ID NO: 131644 - protein, 9 aa, Homo sapiens
PHHERCSDS

SEQ ID NO: 131645 - protein, 9 aa, Homo sapiens
HHERCSDSD

SEQ ID NO: 131646 - protein, 9 aa, Homo sapiens
HERCSDSDG

SEQ ID NO: 131647 - protein, 9 aa, Homo sapiens
ERCSDSDGL

SEQ ID NO: 131648 - protein, 9 aa, Homo sapiens
RCSDSDGLA

SEQ ID NO: 131649 - protein, 9 aa, Homo sapiens
CSDSDGLAP

SEQ ID NO: 131650 - protein, 9 aa, Homo sapiens
SDSDGLAPP

SEQ ID NO: 131651 - protein, 9 aa, Homo sapiens
DSDGLAPPQ

SEQ ID NO: 131652 - protein, 9 aa, Homo sapiens
SDGLAPPQH

SEQ ID NO: 131653 - protein, 9 aa, Homo sapiens
DGLAPPQHL

SEQ ID NO: 131654 - protein, 9 aa, Homo sapiens
GLAPPQHLI

SEQ ID NO: 131655 - protein, 9 aa, Homo sapiens
LAPPQHLIR

SEQ ID NO: 131656 - protein, 9 aa, Homo sapiens
APPQHLIRV

SEQ ID NO: 131657 - protein, 9 aa, Homo sapiens
PPQHLIRVE

SEQ ID NO: 131658 - protein, 9 aa, Homo sapiens
PQHLIRVEG

SEQ ID NO: 131659 - protein, 9 aa, Homo sapiens
QHLIRVEGN

SEQ ID NO: 131660 - protein, 9 aa, Homo sapiens
HLIRVEGNL

SEQ ID NO: 131661 - protein, 9 aa, Homo sapiens
LIRVEGNLR

SEQ ID NO: 131662 - protein, 9 aa, Homo sapiens
IRVEGNLRV

SEQ ID NO: 131663 - protein, 9 aa, Homo sapiens
RVEGNLRVE

SEQ ID NO: 131664 - protein, 9 aa, Homo sapiens
VEGNLRVEY

SEQ ID NO: 131665 - protein, 9 aa, Homo sapiens
EGNLRVEYL

SEQ ID NO: 131666 - protein, 9 aa, Homo sapiens
GNLRVEYLD

SEQ ID NO: 131667 - protein, 9 aa, Homo sapiens
NLRVEYLDD

SEQ ID NO: 131668 - protein, 9 aa, Homo sapiens
LRVEYLDDR

SEQ ID NO: 131669 - protein, 9 aa, Homo sapiens
RVEYLDDRN

SEQ ID NO: 131670 - protein, 9 aa, Homo sapiens
VEYLDDRNT

SEQ ID NO: 131671 - protein, 9 aa, Homo sapiens
EYLDDRNTF

SEQ ID NO: 131672 - protein, 9 aa, Homo sapiens
YLDDRNTFR

SEQ ID NO: 131673 - protein, 9 aa, Homo sapiens
LDDRNTFRH

SEQ ID NO: 131674 - protein, 9 aa, Homo sapiens
DDRNTFRHS

SEQ ID NO: 131675 - protein, 9 aa, Homo sapiens
DRNTFRHSV

SEQ ID NO: 131676 - protein, 9 aa, Homo sapiens
RNTFRHSVV

SEQ ID NO: 131677 - protein, 9 aa, Homo sapiens
NTFRHSVVV

SEQ ID NO: 131678 - protein, 9 aa, Homo sapiens
TFRHSVVVP

SEQ ID NO: 131679 - protein, 9 aa, Homo sapiens
FRHSVVVPY

SEQ ID NO: 131680 - protein, 9 aa, Homo sapiens
RHSVVVPYE

SEQ ID NO: 131681 - protein, 9 aa, Homo sapiens
HSVVVPYEP

SEQ ID NO: 131682 - protein, 9 aa, Homo sapiens
SVVVPYEPP

SEQ ID NO: 131683 - protein, 9 aa, Homo sapiens
VVVPYEPPE

SEQ ID NO: 131684 - protein, 9 aa, Homo sapiens
VVPYEPPEV

SEQ ID NO: 131685 - protein, 9 aa, Homo sapiens
VPYEPPEVG

SEQ ID NO: 131686 - protein, 9 aa, Homo sapiens
PYEPPEVGS

SEQ ID NO: 131687 - protein, 9 aa, Homo sapiens
YEPPEVGSD

SEQ ID NO: 131688 - protein, 9 aa, Homo sapiens
EPPEVGSDC

SEQ ID NO: 131689 - protein, 9 aa, Homo sapiens
PPEVGSDCT

SEQ ID NO: 131690 - protein, 9 aa, Homo sapiens
PEVGSDCTT

SEQ ID NO: 131691 - protein, 9 aa, Homo sapiens
EVGSDCTTI

SEQ ID NO: 131692 - protein, 9 aa, Homo sapiens
VGSDCTTIH

SEQ ID NO: 131693 - protein, 9 aa, Homo sapiens
GSDCTTIHY

SEQ ID NO: 131694 - protein, 9 aa, Homo sapiens
SDCTTIHYN

SEQ ID NO: 131695 - protein, 9 aa, Homo sapiens
DCTTIHYNY

SEQ ID NO: 131696 - protein, 9 aa, Homo sapiens
CTTIHYNYM

SEQ ID NO: 131697 - protein, 9 aa, Homo sapiens
TTIHYNYMC

SEQ ID NO: 131698 - protein, 9 aa, Homo sapiens
TIHYNYMCN

SEQ ID NO: 131699 - protein, 9 aa, Homo sapiens
IHYNYMCNS

SEQ ID NO: 131700 - protein, 9 aa, Homo sapiens
HYNYMCNSS

SEQ ID NO: 131701 - protein, 9 aa, Homo sapiens
YNYMCNSSC

SEQ ID NO: 131702 - protein, 9 aa, Homo sapiens
NYMCNSSCM

SEQ ID NO: 131703 - protein, 9 aa, Homo sapiens
YMCNSSCMG

SEQ ID NO: 131704 - protein, 9 aa, Homo sapiens
MCNSSCMGG

SEQ ID NO: 131705 - protein, 9 aa, Homo sapiens
CNSSCMGGM

SEQ ID NO: 131706 - protein, 9 aa, Homo sapiens
NSSCMGGMN

SEQ ID NO: 131707 - protein, 9 aa, Homo sapiens
SSCMGGMNR

SEQ ID NO: 131708 - protein, 9 aa, Homo sapiens
SCMGGMNRR

SEQ ID NO: 131709 - protein, 9 aa, Homo sapiens
CMGGMNRRP

SEQ ID NO: 131710 - protein, 9 aa, Homo sapiens
MGGMNRRPI

SEQ ID NO: 131711 - protein, 9 aa, Homo sapiens
GGMNRRPIL

SEQ ID NO: 131712 - protein, 9 aa, Homo sapiens
GMNRRPILT

SEQ ID NO: 131713 - protein, 9 aa, Homo sapiens
MNRRPILTI

SEQ ID NO: 131714 - protein, 9 aa, Homo sapiens
NRRPILTII

SEQ ID NO: 131715 - protein, 9 aa, Homo sapiens
RRPILTIIT

SEQ ID NO: 131716 - protein, 9 aa, Homo sapiens
RPILTIITL

SEQ ID NO: 131717 - protein, 9 aa, Homo sapiens
PILTIITLE

SEQ ID NO: 131718 - protein, 9 aa, Homo sapiens
ILTIITLED

SEQ ID NO: 131719 - protein, 9 aa, Homo sapiens
LTIITLEDS

SEQ ID NO: 131720 - protein, 9 aa, Homo sapiens
TIITLEDSS

SEQ ID NO: 131721 - protein, 9 aa, Homo sapiens
IITLEDSSG

SEQ ID NO: 131722 - protein, 9 aa, Homo sapiens
ITLEDSSGN

SEQ ID NO: 131723 - protein, 9 aa, Homo sapiens
TLEDSSGNL

SEQ ID NO: 131724 - protein, 9 aa, Homo sapiens
LEDSSGNLL

SEQ ID NO: 131725 - protein, 9 aa, Homo sapiens
EDSSGNLLG

SEQ ID NO: 131726 - protein, 9 aa, Homo sapiens
DSSGNLLGR

SEQ ID NO: 131727 - protein, 9 aa, Homo sapiens
SSGNLLGRN

SEQ ID NO: 131728 - protein, 9 aa, Homo sapiens
SGNLLGRNS

SEQ ID NO: 131729 - protein, 9 aa, Homo sapiens
GNLLGRNSF

SEQ ID NO: 131730 - protein, 9 aa, Homo sapiens
NLLGRNSFE

SEQ ID NO: 131731 - protein, 9 aa, Homo sapiens
LLGRNSFEV

SEQ ID NO: 131732 - protein, 9 aa, Homo sapiens
LGRNSFEVR

SEQ ID NO: 131733 - protein, 9 aa, Homo sapiens
GRNSFEVRV

SEQ ID NO: 131734 - protein, 9 aa, Homo sapiens
RNSFEVRVC

SEQ ID NO: 131735 - protein, 9 aa, Homo sapiens
NSFEVRVCA

SEQ ID NO: 131736 - protein, 9 aa, Homo sapiens
SFEVRVCAC

SEQ ID NO: 131737 - protein, 9 aa, Homo sapiens
FEVRVCACP

SEQ ID NO: 131738 - protein, 9 aa, Homo sapiens
EVRVCACPG

SEQ ID NO: 131739 - protein, 9 aa, Homo sapiens
VRVCACPGR

SEQ ID NO: 131740 - protein, 9 aa, Homo sapiens
RVCACPGRD

SEQ ID NO: 131741 - protein, 9 aa, Homo sapiens
VCACPGRDR

SEQ ID NO: 131742 - protein, 9 aa, Homo sapiens
CACPGRDRR

SEQ ID NO: 131743 - protein, 9 aa, Homo sapiens
ACPGRDRRT

SEQ ID NO: 131744 - protein, 9 aa, Homo sapiens
CPGRDRRTE

SEQ ID NO: 131745 - protein, 9 aa, Homo sapiens
PGRDRRTEE

SEQ ID NO: 131746 - protein, 9 aa, Homo sapiens
GRDRRTEEE

SEQ ID NO: 131747 - protein, 9 aa, Homo sapiens
RDRRTEEEN

SEQ ID NO: 131748 - protein, 9 aa, Homo sapiens
DRRTEEENL

SEQ ID NO: 131749 - protein, 9 aa, Homo sapiens
RRTEEENLR

SEQ ID NO: 131750 - protein, 9 aa, Homo sapiens
RTEEENLRK

SEQ ID NO: 131751 - protein, 9 aa, Homo sapiens
TEEENLRKK

SEQ ID NO: 131752 - protein, 9 aa, Homo sapiens
EEENLRKKG

SEQ ID NO: 131753 - protein, 9 aa, Homo sapiens
EENLRKKGE

SEQ ID NO: 131754 - protein, 9 aa, Homo sapiens
ENLRKKGEP

SEQ ID NO: 131755 - protein, 9 aa, Homo sapiens
NLRKKGEPH

SEQ ID NO: 131756 - protein, 9 aa, Homo sapiens
LRKKGEPHH

SEQ ID NO: 131757 - protein, 9 aa, Homo sapiens
RKKGEPHHE

SEQ ID NO: 131758 - protein, 9 aa, Homo sapiens
KKGEPHHEL

SEQ ID NO: 131759 - protein, 9 aa, Homo sapiens
KGEPHHELP

SEQ ID NO: 131760 - protein, 9 aa, Homo sapiens
GEPHHELPP

SEQ ID NO: 131761 - protein, 9 aa, Homo sapiens
EPHHELPPG

SEQ ID NO: 131762 - protein, 9 aa, Homo sapiens
PHHELPPGS

SEQ ID NO: 131763 - protein, 9 aa, Homo sapiens
HHELPPGST

SEQ ID NO: 131764 - protein, 9 aa, Homo sapiens
HELPPGSTK

SEQ ID NO: 131765 - protein, 9 aa, Homo sapiens
ELPPGSTKR

SEQ ID NO: 131766 - protein, 9 aa, Homo sapiens
LPPGSTKRA

SEQ ID NO: 131767 - protein, 9 aa, Homo sapiens
PPGSTKRAL

SEQ ID NO: 131768 - protein, 9 aa, Homo sapiens
PGSTKRALP

SEQ ID NO: 131769 - protein, 9 aa, Homo sapiens
GSTKRALPN

SEQ ID NO: 131770 - protein, 9 aa, Homo sapiens
STKRALPNN

SEQ ID NO: 131771 - protein, 9 aa, Homo sapiens
TKRALPNNT

SEQ ID NO: 131772 - protein, 9 aa, Homo sapiens
KRALPNNTS

SEQ ID NO: 131773 - protein, 9 aa, Homo sapiens
RALPNNTSS

SEQ ID NO: 131774 - protein, 9 aa, Homo sapiens
ALPNNTSSS

SEQ ID NO: 131775 - protein, 9 aa, Homo sapiens
LPNNTSSSP

SEQ ID NO: 131776 - protein, 9 aa, Homo sapiens
PNNTSSSPQ

SEQ ID NO: 131777 - protein, 9 aa, Homo sapiens
NNTSSSPQP

SEQ ID NO: 131778 - protein, 9 aa, Homo sapiens
NTSSSPQPK

SEQ ID NO: 131779 - protein, 9 aa, Homo sapiens
TSSSPQPKK

SEQ ID NO: 131780 - protein, 9 aa, Homo sapiens
SSSPQPKKK

SEQ ID NO: 131781 - protein, 9 aa, Homo sapiens
SSPQPKKKP

SEQ ID NO: 131782 - protein, 9 aa, Homo sapiens
SPQPKKKPL

SEQ ID NO: 131783 - protein, 9 aa, Homo sapiens
PQPKKKPLD

SEQ ID NO: 131784 - protein, 9 aa, Homo sapiens
QPKKKPLDG

SEQ ID NO: 131785 - protein, 9 aa, Homo sapiens
PKKKPLDGE

SEQ ID NO: 131786 - protein, 9 aa, Homo sapiens
KKKPLDGEY

SEQ ID NO: 131787 - protein, 9 aa, Homo sapiens
KKPLDGEYF

SEQ ID NO: 131788 - protein, 9 aa, Homo sapiens
KPLDGEYFT

SEQ ID NO: 131789 - protein, 9 aa, Homo sapiens
PLDGEYFTL

SEQ ID NO: 131790 - protein, 9 aa, Homo sapiens
LDGEYFTLQ

SEQ ID NO: 131791 - protein, 9 aa, Homo sapiens
DGEYFTLQI

SEQ ID NO: 131792 - protein, 9 aa, Homo sapiens
GEYFTLQIR

SEQ ID NO: 131793 - protein, 9 aa, Homo sapiens
EYFTLQIRG

SEQ ID NO: 131794 - protein, 9 aa, Homo sapiens
YFTLQIRGR

SEQ ID NO: 131795 - protein, 9 aa, Homo sapiens
FTLQIRGRE

SEQ ID NO: 131796 - protein, 9 aa, Homo sapiens
TLQIRGRER

SEQ ID NO: 131797 - protein, 9 aa, Homo sapiens
LQIRGRERF

SEQ ID NO: 131798 - protein, 9 aa, Homo sapiens
QIRGRERFE

SEQ ID NO: 131799 - protein, 9 aa, Homo sapiens
IRGRERFEM

SEQ ID NO: 131800 - protein, 9 aa, Homo sapiens
RGRERFEMF

SEQ ID NO: 131801 - protein, 9 aa, Homo sapiens
GRERFEMFR

SEQ ID NO: 131802 - protein, 9 aa, Homo sapiens
RERFEMFRE

SEQ ID NO: 131803 - protein, 9 aa, Homo sapiens
ERFEMFREL

SEQ ID NO: 131804 - protein, 9 aa, Homo sapiens
RFEMFRELN

SEQ ID NO: 131805 - protein, 9 aa, Homo sapiens
FEMFRELNE

SEQ ID NO: 131806 - protein, 9 aa, Homo sapiens
EMFRELNEA

SEQ ID NO: 131807 - protein, 9 aa, Homo sapiens
MFRELNEAL

SEQ ID NO: 131808 - protein, 9 aa, Homo sapiens
FRELNEALE

SEQ ID NO: 131809 - protein, 9 aa, Homo sapiens
RELNEALEL

SEQ ID NO: 131810 - protein, 9 aa, Homo sapiens
ELNEALELK

SEQ ID NO: 131811 - protein, 9 aa, Homo sapiens
LNEALELKD

SEQ ID NO: 131812 - protein, 9 aa, Homo sapiens
NEALELKDA

SEQ ID NO: 131813 - protein, 9 aa, Homo sapiens
EALELKDAQ

SEQ ID NO: 131814 - protein, 9 aa, Homo sapiens
ALELKDAQA

SEQ ID NO: 131815 - protein, 9 aa, Homo sapiens
LELKDAQAG

SEQ ID NO: 131816 - protein, 9 aa, Homo sapiens
ELKDAQAGK

SEQ ID NO: 131817 - protein, 9 aa, Homo sapiens
LKDAQAGKE

SEQ ID NO: 131818 - protein, 9 aa, Homo sapiens
KDAQAGKEP

SEQ ID NO: 131819 - protein, 9 aa, Homo sapiens
DAQAGKEPG

SEQ ID NO: 131820 - protein, 9 aa, Homo sapiens
AQAGKEPGG

SEQ ID NO: 131821 - protein, 9 aa, Homo sapiens
QAGKEPGGS

SEQ ID NO: 131822 - protein, 9 aa, Homo sapiens
AGKEPGGSR

SEQ ID NO: 131823 - protein, 9 aa, Homo sapiens
GKEPGGSRA

SEQ ID NO: 131824 - protein, 9 aa, Homo sapiens
KEPGGSRAH

SEQ ID NO: 131825 - protein, 9 aa, Homo sapiens
EPGGSRAHS

SEQ ID NO: 131826 - protein, 9 aa, Homo sapiens
PGGSRAHSS

SEQ ID NO: 131827 - protein, 9 aa, Homo sapiens
GGSRAHSSH

SEQ ID NO: 131828 - protein, 9 aa, Homo sapiens
GSRAHSSHL

SEQ ID NO: 131829 - protein, 9 aa, Homo sapiens
SRAHSSHLK

SEQ ID NO: 131830 - protein, 9 aa, Homo sapiens
RAHSSHLKS

SEQ ID NO: 131831 - protein, 9 aa, Homo sapiens
AHSSHLKSK

SEQ ID NO: 131832 - protein, 9 aa, Homo sapiens
HSSHLKSKK

SEQ ID NO: 131833 - protein, 9 aa, Homo sapiens
SSHLKSKKG

SEQ ID NO: 131834 - protein, 9 aa, Homo sapiens
SHLKSKKGQ

SEQ ID NO: 131835 - protein, 9 aa, Homo sapiens
HLKSKKGQS

SEQ ID NO: 131836 - protein, 9 aa, Homo sapiens
LKSKKGQST

SEQ ID NO: 131837 - protein, 9 aa, Homo sapiens
KSKKGQSTS

SEQ ID NO: 131838 - protein, 9 aa, Homo sapiens
SKKGQSTSR

SEQ ID NO: 131839 - protein, 9 aa, Homo sapiens
KKGQSTSRH

SEQ ID NO: 131840 - protein, 9 aa, Homo sapiens
KGQSTSRHK

SEQ ID NO: 131841 - protein, 9 aa, Homo sapiens
GQSTSRHKK

SEQ ID NO: 131842 - protein, 9 aa, Homo sapiens
QSTSRHKKL

SEQ ID NO: 131843 - protein, 9 aa, Homo sapiens
STSRHKKLM

SEQ ID NO: 131844 - protein, 9 aa, Homo sapiens
TSRHKKLMF

SEQ ID NO: 131845 - protein, 9 aa, Homo sapiens
SRHKKLMFK

SEQ ID NO: 131846 - protein, 9 aa, Homo sapiens
RHKKLMFKT

SEQ ID NO: 131847 - protein, 9 aa, Homo sapiens
HKKLMFKTE

SEQ ID NO: 131848 - protein, 9 aa, Homo sapiens
KKLMFKTEG

SEQ ID NO: 131849 - protein, 9 aa, Homo sapiens
KLMFKTEGP

SEQ ID NO: 131850 - protein, 9 aa, Homo sapiens
LMFKTEGPD

SEQ ID NO: 131851 - protein, 9 aa, Homo sapiens
MFKTEGPDS

SEQ ID NO: 131852 - protein, 9 aa, Homo sapiens
FKTEGPDSD

SEQ ID NO: 131853 - protein, 9 aa, Homo sapiens
MRAAPLLLA

SEQ ID NO: 131854 - protein, 9 aa, Homo sapiens
RAAPLLLAR

SEQ ID NO: 131855 - protein, 9 aa, Homo sapiens
AAPLLLARA

SEQ ID NO: 131856 - protein, 9 aa, Homo sapiens
APLLLARAA

SEQ ID NO: 131857 - protein, 9 aa, Homo sapiens
PLLLARAAS

SEQ ID NO: 131858 - protein, 9 aa, Homo sapiens
LLLARAASL

SEQ ID NO: 131859 - protein, 9 aa, Homo sapiens
LLARAASLS

SEQ ID NO: 131860 - protein, 9 aa, Homo sapiens
LARAASLSL

SEQ ID NO: 131861 - protein, 9 aa, Homo sapiens
ARAASLSLG

SEQ ID NO: 131862 - protein, 9 aa, Homo sapiens
RAASLSLGF

SEQ ID NO: 131863 - protein, 9 aa, Homo sapiens
AASLSLGFL

SEQ ID NO: 131864 - protein, 9 aa, Homo sapiens
ASLSLGFLF

SEQ ID NO: 131865 - protein, 9 aa, Homo sapiens
SLSLGFLFL

SEQ ID NO: 131866 - protein, 9 aa, Homo sapiens
LSLGFLFLL

SEQ ID NO: 131867 - protein, 9 aa, Homo sapiens
SLGFLFLLF

SEQ ID NO: 131868 - protein, 9 aa, Homo sapiens
LGFLFLLFF

SEQ ID NO: 131869 - protein, 9 aa, Homo sapiens
GFLFLLFFW

SEQ ID NO: 131870 - protein, 9 aa, Homo sapiens
FLFLLFFWL

SEQ ID NO: 131871 - protein, 9 aa, Homo sapiens
LFLLFFWLD

SEQ ID NO: 131872 - protein, 9 aa, Homo sapiens
FLLFFWLDR

SEQ ID NO: 131873 - protein, 9 aa, Homo sapiens
LLFFWLDRS

SEQ ID NO: 131874 - protein, 9 aa, Homo sapiens
LFFWLDRSV

SEQ ID NO: 131875 - protein, 9 aa, Homo sapiens
FFWLDRSVL

SEQ ID NO: 131876 - protein, 9 aa, Homo sapiens
FWLDRSVLA

SEQ ID NO: 131877 - protein, 9 aa, Homo sapiens
WLDRSVLAK

SEQ ID NO: 131878 - protein, 9 aa, Homo sapiens
LDRSVLAKE

SEQ ID NO: 131879 - protein, 9 aa, Homo sapiens
DRSVLAKEL

SEQ ID NO: 131880 - protein, 9 aa, Homo sapiens
RSVLAKELK

SEQ ID NO: 131881 - protein, 9 aa, Homo sapiens
SVLAKELKF

SEQ ID NO: 131882 - protein, 9 aa, Homo sapiens
VLAKELKFV

SEQ ID NO: 131883 - protein, 9 aa, Homo sapiens
LAKELKFVT

SEQ ID NO: 131884 - protein, 9 aa, Homo sapiens
AKELKFVTL

SEQ ID NO: 131885 - protein, 9 aa, Homo sapiens
KELKFVTLV

SEQ ID NO: 131886 - protein, 9 aa, Homo sapiens
ELKFVTLVF

SEQ ID NO: 131887 - protein, 9 aa, Homo sapiens
LKFVTLVFR

SEQ ID NO: 131888 - protein, 9 aa, Homo sapiens
KFVTLVFRH

SEQ ID NO: 131889 - protein, 9 aa, Homo sapiens
FVTLVFRHG

SEQ ID NO: 131890 - protein, 9 aa, Homo sapiens
VTLVFRHGD

SEQ ID NO: 131891 - protein, 9 aa, Homo sapiens
TLVFRHGDR

SEQ ID NO: 131892 - protein, 9 aa, Homo sapiens
LVFRHGDRS

SEQ ID NO: 131893 - protein, 9 aa, Homo sapiens
VFRHGDRSP

SEQ ID NO: 131894 - protein, 9 aa, Homo sapiens
FRHGDRSPI

SEQ ID NO: 131895 - protein, 9 aa, Homo sapiens
RHGDRSPID

SEQ ID NO: 131896 - protein, 9 aa, Homo sapiens
HGDRSPIDT

SEQ ID NO: 131897 - protein, 9 aa, Homo sapiens
GDRSPIDTF

SEQ ID NO: 131898 - protein, 9 aa, Homo sapiens
DRSPIDTFP

SEQ ID NO: 131899 - protein, 9 aa, Homo sapiens
RSPIDTFPT

SEQ ID NO: 131900 - protein, 9 aa, Homo sapiens
SPIDTFPTD

SEQ ID NO: 131901 - protein, 9 aa, Homo sapiens
PIDTFPTDP

SEQ ID NO: 131902 - protein, 9 aa, Homo sapiens
IDTFPTDPI

SEQ ID NO: 131903 - protein, 9 aa, Homo sapiens
DTFPTDPIK

SEQ ID NO: 131904 - protein, 9 aa, Homo sapiens
TFPTDPIKE

SEQ ID NO: 131905 - protein, 9 aa, Homo sapiens
FPTDPIKES

SEQ ID NO: 131906 - protein, 9 aa, Homo sapiens
PTDPIKESS

SEQ ID NO: 131907 - protein, 9 aa, Homo sapiens
TDPIKESSW

SEQ ID NO: 131908 - protein, 9 aa, Homo sapiens
DPIKESSWP

SEQ ID NO: 131909 - protein, 9 aa, Homo sapiens
PIKESSWPQ

SEQ ID NO: 131910 - protein, 9 aa, Homo sapiens
IKESSWPQG

SEQ ID NO: 131911 - protein, 9 aa, Homo sapiens
KESSWPQGF

SEQ ID NO: 131912 - protein, 9 aa, Homo sapiens
ESSWPQGFG

SEQ ID NO: 131913 - protein, 9 aa, Homo sapiens
SSWPQGFGQ

SEQ ID NO: 131914 - protein, 9 aa, Homo sapiens
SWPQGFGQL

SEQ ID NO: 131915 - protein, 9 aa, Homo sapiens
WPQGFGQLT

SEQ ID NO: 131916 - protein, 9 aa, Homo sapiens
PQGFGQLTQ

SEQ ID NO: 131917 - protein, 9 aa, Homo sapiens
QGFGQLTQL

SEQ ID NO: 131918 - protein, 9 aa, Homo sapiens
GFGQLTQLG

SEQ ID NO: 131919 - protein, 9 aa, Homo sapiens
FGQLTQLGM

SEQ ID NO: 131920 - protein, 9 aa, Homo sapiens
GQLTQLGME

SEQ ID NO: 131921 - protein, 9 aa, Homo sapiens
QLTQLGMEQ

SEQ ID NO: 131922 - protein, 9 aa, Homo sapiens
LTQLGMEQH

SEQ ID NO: 131923 - protein, 9 aa, Homo sapiens
TQLGMEQHY

SEQ ID NO: 131924 - protein, 9 aa, Homo sapiens
QLGMEQHYE

SEQ ID NO: 131925 - protein, 9 aa, Homo sapiens
LGMEQHYEL

SEQ ID NO: 131926 - protein, 9 aa, Homo sapiens
GMEQHYELG

SEQ ID NO: 131927 - protein, 9 aa, Homo sapiens
MEQHYELGE

SEQ ID NO: 131928 - protein, 9 aa, Homo sapiens
EQHYELGEY

SEQ ID NO: 131929 - protein, 9 aa, Homo sapiens
QHYELGEYI

SEQ ID NO: 131930 - protein, 9 aa, Homo sapiens
HYELGEYIR

SEQ ID NO: 131931 - protein, 9 aa, Homo sapiens
YELGEYIRK

SEQ ID NO: 131932 - protein, 9 aa, Homo sapiens
ELGEYIRKR

SEQ ID NO: 131933 - protein, 9 aa, Homo sapiens
LGEYIRKRY

SEQ ID NO: 131934 - protein, 9 aa, Homo sapiens
GEYIRKRYR

SEQ ID NO: 131935 - protein, 9 aa, Homo sapiens
EYIRKRYRK

SEQ ID NO: 131936 - protein, 9 aa, Homo sapiens
YIRKRYRKF

SEQ ID NO: 131937 - protein, 9 aa, Homo sapiens
IRKRYRKFL

SEQ ID NO: 131938 - protein, 9 aa, Homo sapiens
RKRYRKFLN

SEQ ID NO: 131939 - protein, 9 aa, Homo sapiens
KRYRKFLNE

SEQ ID NO: 131940 - protein, 9 aa, Homo sapiens
RYRKFLNES

SEQ ID NO: 131941 - protein, 9 aa, Homo sapiens
YRKFLNESY

SEQ ID NO: 131942 - protein, 9 aa, Homo sapiens
RKFLNESYK

SEQ ID NO: 131943 - protein, 9 aa, Homo sapiens
KFLNESYKH

SEQ ID NO: 131944 - protein, 9 aa, Homo sapiens
FLNESYKHE

SEQ ID NO: 131945 - protein, 9 aa, Homo sapiens
LNESYKHEQ

SEQ ID NO: 131946 - protein, 9 aa, Homo sapiens
NESYKHEQV

SEQ ID NO: 131947 - protein, 9 aa, Homo sapiens
ESYKHEQVY

SEQ ID NO: 131948 - protein, 9 aa, Homo sapiens
SYKHEQVYI

SEQ ID NO: 131949 - protein, 9 aa, Homo sapiens
YKHEQVYIR

SEQ ID NO: 131950 - protein, 9 aa, Homo sapiens
KHEQVYIRS

SEQ ID NO: 131951 - protein, 9 aa, Homo sapiens
HEQVYIRST

SEQ ID NO: 131952 - protein, 9 aa, Homo sapiens
EQVYIRSTD

SEQ ID NO: 131953 - protein, 9 aa, Homo sapiens
QVYIRSTDV

SEQ ID NO: 131954 - protein, 9 aa, Homo sapiens
VYIRSTDVD

SEQ ID NO: 131955 - protein, 9 aa, Homo sapiens
YIRSTDVDR

SEQ ID NO: 131956 - protein, 9 aa, Homo sapiens
IRSTDVDRT

SEQ ID NO: 131957 - protein, 9 aa, Homo sapiens
RSTDVDRTL

SEQ ID NO: 131958 - protein, 9 aa, Homo sapiens
STDVDRTLM

SEQ ID NO: 131959 - protein, 9 aa, Homo sapiens
TDVDRTLMS

SEQ ID NO: 131960 - protein, 9 aa, Homo sapiens
DVDRTLMSA

SEQ ID NO: 131961 - protein, 9 aa, Homo sapiens
VDRTLMSAM

SEQ ID NO: 131962 - protein, 9 aa, Homo sapiens
DRTLMSAMT

SEQ ID NO: 131963 - protein, 9 aa, Homo sapiens
RTLMSAMTN

SEQ ID NO: 131964 - protein, 9 aa, Homo sapiens
TLMSAMTNL

SEQ ID NO: 131965 - protein, 9 aa, Homo sapiens
LMSAMTNLA

SEQ ID NO: 131966 - protein, 9 aa, Homo sapiens
MSAMTNLAA

SEQ ID NO: 131967 - protein, 9 aa, Homo sapiens
SAMTNLAAL

SEQ ID NO: 131968 - protein, 9 aa, Homo sapiens
AMTNLAALF

SEQ ID NO: 131969 - protein, 9 aa, Homo sapiens
MTNLAALFP

SEQ ID NO: 131970 - protein, 9 aa, Homo sapiens
TNLAALFPP

SEQ ID NO: 131971 - protein, 9 aa, Homo sapiens
NLAALFPPE

SEQ ID NO: 131972 - protein, 9 aa, Homo sapiens
LAALFPPEG

SEQ ID NO: 131973 - protein, 9 aa, Homo sapiens
AALFPPEGV

SEQ ID NO: 131974 - protein, 9 aa, Homo sapiens
ALFPPEGVS

SEQ ID NO: 131975 - protein, 9 aa, Homo sapiens
LFPPEGVSI

SEQ ID NO: 131976 - protein, 9 aa, Homo sapiens
FPPEGVSIW

SEQ ID NO: 131977 - protein, 9 aa, Homo sapiens
PPEGVSIWN

SEQ ID NO: 131978 - protein, 9 aa, Homo sapiens
PEGVSIWNP

SEQ ID NO: 131979 - protein, 9 aa, Homo sapiens
EGVSIWNPI

SEQ ID NO: 131980 - protein, 9 aa, Homo sapiens
GVSIWNPIL

SEQ ID NO: 131981 - protein, 9 aa, Homo sapiens
VSIWNPILL

SEQ ID NO: 131982 - protein, 9 aa, Homo sapiens
SIWNPILLW

SEQ ID NO: 131983 - protein, 9 aa, Homo sapiens
IWNPILLWQ

SEQ ID NO: 131984 - protein, 9 aa, Homo sapiens
WNPILLWQP

SEQ ID NO: 131985 - protein, 9 aa, Homo sapiens
NPILLWQPI

SEQ ID NO: 131986 - protein, 9 aa, Homo sapiens
PILLWQPIP

SEQ ID NO: 131987 - protein, 9 aa, Homo sapiens
ILLWQPIPV

SEQ ID NO: 131988 - protein, 9 aa, Homo sapiens
LLWQPIPVH

SEQ ID NO: 131989 - protein, 9 aa, Homo sapiens
LWQPIPVHT

SEQ ID NO: 131990 - protein, 9 aa, Homo sapiens
WQPIPVHTV

SEQ ID NO: 131991 - protein, 9 aa, Homo sapiens
QPIPVHTVP

SEQ ID NO: 131992 - protein, 9 aa, Homo sapiens
PIPVHTVPL

SEQ ID NO: 131993 - protein, 9 aa, Homo sapiens
IPVHTVPLS

SEQ ID NO: 131994 - protein, 9 aa, Homo sapiens
PVHTVPLSE

SEQ ID NO: 131995 - protein, 9 aa, Homo sapiens
VHTVPLSED

SEQ ID NO: 131996 - protein, 9 aa, Homo sapiens
HTVPLSEDQ

SEQ ID NO: 131997 - protein, 9 aa, Homo sapiens
TVPLSEDQL

SEQ ID NO: 131998 - protein, 9 aa, Homo sapiens
VPLSEDQLL

SEQ ID NO: 131999 - protein, 9 aa, Homo sapiens
PLSEDQLLY

SEQ ID NO: 132000 - protein, 9 aa, Homo sapiens
LSEDQLLYL

SEQ ID NO: 132001 - protein, 9 aa, Homo sapiens
SEDQLLYLP

SEQ ID NO: 132002 - protein, 9 aa, Homo sapiens
EDQLLYLPF

SEQ ID NO: 132003 - protein, 9 aa, Homo sapiens
DQLLYLPFR

SEQ ID NO: 132004 - protein, 9 aa, Homo sapiens
QLLYLPFRN

SEQ ID NO: 132005 - protein, 9 aa, Homo sapiens
LLYLPFRNC

SEQ ID NO: 132006 - protein, 9 aa, Homo sapiens
LYLPFRNCP

SEQ ID NO: 132007 - protein, 9 aa, Homo sapiens
YLPFRNCPR

SEQ ID NO: 132008 - protein, 9 aa, Homo sapiens
LPFRNCPRF

SEQ ID NO: 132009 - protein, 9 aa, Homo sapiens
PFRNCPRFQ

SEQ ID NO: 132010 - protein, 9 aa, Homo sapiens
FRNCPRFQE

SEQ ID NO: 132011 - protein, 9 aa, Homo sapiens
RNCPRFQEL

SEQ ID NO: 132012 - protein, 9 aa, Homo sapiens
NCPRFQELE

SEQ ID NO: 132013 - protein, 9 aa, Homo sapiens
CPRFQELES

SEQ ID NO: 132014 - protein, 9 aa, Homo sapiens
PRFQELESE

SEQ ID NO: 132015 - protein, 9 aa, Homo sapiens
RFQELESET

SEQ ID NO: 132016 - protein, 9 aa, Homo sapiens
FQELESETL

SEQ ID NO: 132017 - protein, 9 aa, Homo sapiens
QELESETLK

SEQ ID NO: 132018 - protein, 9 aa, Homo sapiens
ELESETLKS

SEQ ID NO: 132019 - protein, 9 aa, Homo sapiens
LESETLKSE

SEQ ID NO: 132020 - protein, 9 aa, Homo sapiens
ESETLKSEE

SEQ ID NO: 132021 - protein, 9 aa, Homo sapiens
SETLKSEEF

SEQ ID NO: 132022 - protein, 9 aa, Homo sapiens
ETLKSEEFQ

SEQ ID NO: 132023 - protein, 9 aa, Homo sapiens
TLKSEEFQK

SEQ ID NO: 132024 - protein, 9 aa, Homo sapiens
LKSEEFQKR

SEQ ID NO: 132025 - protein, 9 aa, Homo sapiens
KSEEFQKRL

SEQ ID NO: 132026 - protein, 9 aa, Homo sapiens
SEEFQKRLH

SEQ ID NO: 132027 - protein, 9 aa, Homo sapiens
EEFQKRLHP

SEQ ID NO: 132028 - protein, 9 aa, Homo sapiens
EFQKRLHPY

SEQ ID NO: 132029 - protein, 9 aa, Homo sapiens
FQKRLHPYK

SEQ ID NO: 132030 - protein, 9 aa, Homo sapiens
QKRLHPYKD

SEQ ID NO: 132031 - protein, 9 aa, Homo sapiens
KRLHPYKDF

SEQ ID NO: 132032 - protein, 9 aa, Homo sapiens
RLHPYKDFI

SEQ ID NO: 132033 - protein, 9 aa, Homo sapiens
LHPYKDFIA

SEQ ID NO: 132034 - protein, 9 aa, Homo sapiens
HPYKDFIAT

SEQ ID NO: 132035 - protein, 9 aa, Homo sapiens
PYKDFIATL

SEQ ID NO: 132036 - protein, 9 aa, Homo sapiens
YKDFIATLG

SEQ ID NO: 132037 - protein, 9 aa, Homo sapiens
KDFIATLGK

SEQ ID NO: 132038 - protein, 9 aa, Homo sapiens
DFIATLGKL

SEQ ID NO: 132039 - protein, 9 aa, Homo sapiens
FIATLGKLS

SEQ ID NO: 132040 - protein, 9 aa, Homo sapiens
IATLGKLSG

SEQ ID NO: 132041 - protein, 9 aa, Homo sapiens
ATLGKLSGL

SEQ ID NO: 132042 - protein, 9 aa, Homo sapiens
TLGKLSGLH

SEQ ID NO: 132043 - protein, 9 aa, Homo sapiens
LGKLSGLHG

SEQ ID NO: 132044 - protein, 9 aa, Homo sapiens
GKLSGLHGQ

SEQ ID NO: 132045 - protein, 9 aa, Homo sapiens
KLSGLHGQD

SEQ ID NO: 132046 - protein, 9 aa, Homo sapiens
LSGLHGQDL

SEQ ID NO: 132047 - protein, 9 aa, Homo sapiens
SGLHGQDLF

SEQ ID NO: 132048 - protein, 9 aa, Homo sapiens
GLHGQDLFG

SEQ ID NO: 132049 - protein, 9 aa, Homo sapiens
LHGQDLFGI

SEQ ID NO: 132050 - protein, 9 aa, Homo sapiens
HGQDLFGIW

SEQ ID NO: 132051 - protein, 9 aa, Homo sapiens
GQDLFGIWS

SEQ ID NO: 132052 - protein, 9 aa, Homo sapiens
QDLFGIWSK

SEQ ID NO: 132053 - protein, 9 aa, Homo sapiens
DLFGIWSKV

SEQ ID NO: 132054 - protein, 9 aa, Homo sapiens
LFGIWSKVY

SEQ ID NO: 132055 - protein, 9 aa, Homo sapiens
FGIWSKVYD

SEQ ID NO: 132056 - protein, 9 aa, Homo sapiens
GIWSKVYDP

SEQ ID NO: 132057 - protein, 9 aa, Homo sapiens
IWSKVYDPL

SEQ ID NO: 132058 - protein, 9 aa, Homo sapiens
WSKVYDPLY

SEQ ID NO: 132059 - protein, 9 aa, Homo sapiens
SKVYDPLYC

SEQ ID NO: 132060 - protein, 9 aa, Homo sapiens
KVYDPLYCE

SEQ ID NO: 132061 - protein, 9 aa, Homo sapiens
VYDPLYCES

SEQ ID NO: 132062 - protein, 9 aa, Homo sapiens
YDPLYCESV

SEQ ID NO: 132063 - protein, 9 aa, Homo sapiens
DPLYCESVH

SEQ ID NO: 132064 - protein, 9 aa, Homo sapiens
PLYCESVHN

SEQ ID NO: 132065 - protein, 9 aa, Homo sapiens
LYCESVHNF

SEQ ID NO: 132066 - protein, 9 aa, Homo sapiens
YCESVHNFT

SEQ ID NO: 132067 - protein, 9 aa, Homo sapiens
CESVHNFTL

SEQ ID NO: 132068 - protein, 9 aa, Homo sapiens
ESVHNFTLP

SEQ ID NO: 132069 - protein, 9 aa, Homo sapiens
SVHNFTLPS

SEQ ID NO: 132070 - protein, 9 aa, Homo sapiens
VHNFTLPSW

SEQ ID NO: 132071 - protein, 9 aa, Homo sapiens
HNFTLPSWA

SEQ ID NO: 132072 - protein, 9 aa, Homo sapiens
NFTLPSWAT

SEQ ID NO: 132073 - protein, 9 aa, Homo sapiens
FTLPSWATE

SEQ ID NO: 132074 - protein, 9 aa, Homo sapiens
TLPSWATED

SEQ ID NO: 132075 - protein, 9 aa, Homo sapiens
LPSWATEDT

SEQ ID NO: 132076 - protein, 9 aa, Homo sapiens
PSWATEDTM

SEQ ID NO: 132077 - protein, 9 aa, Homo sapiens
SWATEDTMT

SEQ ID NO: 132078 - protein, 9 aa, Homo sapiens
WATEDTMTK

SEQ ID NO: 132079 - protein, 9 aa, Homo sapiens
ATEDTMTKL

SEQ ID NO: 132080 - protein, 9 aa, Homo sapiens
TEDTMTKLR

SEQ ID NO: 132081 - protein, 9 aa, Homo sapiens
EDTMTKLRE

SEQ ID NO: 132082 - protein, 9 aa, Homo sapiens
DTMTKLREL

SEQ ID NO: 132083 - protein, 9 aa, Homo sapiens
TMTKLRELS

SEQ ID NO: 132084 - protein, 9 aa, Homo sapiens
MTKLRELSE

SEQ ID NO: 132085 - protein, 9 aa, Homo sapiens
TKLRELSEL

SEQ ID NO: 132086 - protein, 9 aa, Homo sapiens
KLRELSELS

SEQ ID NO: 132087 - protein, 9 aa, Homo sapiens
LRELSELSL

SEQ ID NO: 132088 - protein, 9 aa, Homo sapiens
RELSELSLL

SEQ ID NO: 132089 - protein, 9 aa, Homo sapiens
ELSELSLLS

SEQ ID NO: 132090 - protein, 9 aa, Homo sapiens
LSELSLLSL

SEQ ID NO: 132091 - protein, 9 aa, Homo sapiens
SELSLLSLY

SEQ ID NO: 132092 - protein, 9 aa, Homo sapiens
ELSLLSLYG

SEQ ID NO: 132093 - protein, 9 aa, Homo sapiens
LSLLSLYGI

SEQ ID NO: 132094 - protein, 9 aa, Homo sapiens
SLLSLYGIH

SEQ ID NO: 132095 - protein, 9 aa, Homo sapiens
LLSLYGIHK

SEQ ID NO: 132096 - protein, 9 aa, Homo sapiens
LSLYGIHKQ

SEQ ID NO: 132097 - protein, 9 aa, Homo sapiens
SLYGIHKQK

SEQ ID NO: 132098 - protein, 9 aa, Homo sapiens
LYGIHKQKE

SEQ ID NO: 132099 - protein, 9 aa, Homo sapiens
YGIHKQKEK

SEQ ID NO: 132100 - protein, 9 aa, Homo sapiens
GIHKQKEKS

SEQ ID NO: 132101 - protein, 9 aa, Homo sapiens
IHKQKEKSR

SEQ ID NO: 132102 - protein, 9 aa, Homo sapiens
HKQKEKSRL

SEQ ID NO: 132103 - protein, 9 aa, Homo sapiens
KQKEKSRLQ

SEQ ID NO: 132104 - protein, 9 aa, Homo sapiens
QKEKSRLQG

SEQ ID NO: 132105 - protein, 9 aa, Homo sapiens
KEKSRLQGG

SEQ ID NO: 132106 - protein, 9 aa, Homo sapiens
EKSRLQGGV

SEQ ID NO: 132107 - protein, 9 aa, Homo sapiens
KSRLQGGVL

SEQ ID NO: 132108 - protein, 9 aa, Homo sapiens
SRLQGGVLV

SEQ ID NO: 132109 - protein, 9 aa, Homo sapiens
RLQGGVLVN

SEQ ID NO: 132110 - protein, 9 aa, Homo sapiens
LQGGVLVNE

SEQ ID NO: 132111 - protein, 9 aa, Homo sapiens
QGGVLVNEI

SEQ ID NO: 132112 - protein, 9 aa, Homo sapiens
GGVLVNEIL

SEQ ID NO: 132113 - protein, 9 aa, Homo sapiens
GVLVNEILN

SEQ ID NO: 132114 - protein, 9 aa, Homo sapiens
VLVNEILNH

SEQ ID NO: 132115 - protein, 9 aa, Homo sapiens
LVNEILNHM

SEQ ID NO: 132116 - protein, 9 aa, Homo sapiens
VNEILNHMK

SEQ ID NO: 132117 - protein, 9 aa, Homo sapiens
NEILNHMKR

SEQ ID NO: 132118 - protein, 9 aa, Homo sapiens
EILNHMKRA

SEQ ID NO: 132119 - protein, 9 aa, Homo sapiens
ILNHMKRAT

SEQ ID NO: 132120 - protein, 9 aa, Homo sapiens
LNHMKRATQ

SEQ ID NO: 132121 - protein, 9 aa, Homo sapiens
NHMKRATQI

SEQ ID NO: 132122 - protein, 9 aa, Homo sapiens
HMKRATQIP

SEQ ID NO: 132123 - protein, 9 aa, Homo sapiens
MKRATQIPS

SEQ ID NO: 132124 - protein, 9 aa, Homo sapiens
KRATQIPSY

SEQ ID NO: 132125 - protein, 9 aa, Homo sapiens
RATQIPSYK

SEQ ID NO: 132126 - protein, 9 aa, Homo sapiens
ATQIPSYKK

SEQ ID NO: 132127 - protein, 9 aa, Homo sapiens
TQIPSYKKL

SEQ ID NO: 132128 - protein, 9 aa, Homo sapiens
QIPSYKKLI

SEQ ID NO: 132129 - protein, 9 aa, Homo sapiens
IPSYKKLIM

SEQ ID NO: 132130 - protein, 9 aa, Homo sapiens
PSYKKLIMY

SEQ ID NO: 132131 - protein, 9 aa, Homo sapiens
SYKKLIMYS

SEQ ID NO: 132132 - protein, 9 aa, Homo sapiens
YKKLIMYSA

SEQ ID NO: 132133 - protein, 9 aa, Homo sapiens
KKLIMYSAH

SEQ ID NO: 132134 - protein, 9 aa, Homo sapiens
KLIMYSAHD

SEQ ID NO: 132135 - protein, 9 aa, Homo sapiens
LIMYSAHDT

SEQ ID NO: 132136 - protein, 9 aa, Homo sapiens
IMYSAHDTT

SEQ ID NO: 132137 - protein, 9 aa, Homo sapiens
MYSAHDTTV

SEQ ID NO: 132138 - protein, 9 aa, Homo sapiens
YSAHDTTVS

SEQ ID NO: 132139 - protein, 9 aa, Homo sapiens
SAHDTTVSG

SEQ ID NO: 132140 - protein, 9 aa, Homo sapiens
AHDTTVSGL

SEQ ID NO: 132141 - protein, 9 aa, Homo sapiens
HDTTVSGLQ

SEQ ID NO: 132142 - protein, 9 aa, Homo sapiens
DTTVSGLQM

SEQ ID NO: 132143 - protein, 9 aa, Homo sapiens
TTVSGLQMA

SEQ ID NO: 132144 - protein, 9 aa, Homo sapiens
TVSGLQMAL

SEQ ID NO: 132145 - protein, 9 aa, Homo sapiens
VSGLQMALD

SEQ ID NO: 132146 - protein, 9 aa, Homo sapiens
SGLQMALDV

SEQ ID NO: 132147 - protein, 9 aa, Homo sapiens
GLQMALDVY

SEQ ID NO: 132148 - protein, 9 aa, Homo sapiens
LQMALDVYN

SEQ ID NO: 132149 - protein, 9 aa, Homo sapiens
QMALDVYNG

SEQ ID NO: 132150 - protein, 9 aa, Homo sapiens
MALDVYNGL

SEQ ID NO: 132151 - protein, 9 aa, Homo sapiens
ALDVYNGLL

SEQ ID NO: 132152 - protein, 9 aa, Homo sapiens
LDVYNGLLP

SEQ ID NO: 132153 - protein, 9 aa, Homo sapiens
DVYNGLLPP

SEQ ID NO: 132154 - protein, 9 aa, Homo sapiens
VYNGLLPPY

SEQ ID NO: 132155 - protein, 9 aa, Homo sapiens
YNGLLPPYA

SEQ ID NO: 132156 - protein, 9 aa, Homo sapiens
NGLLPPYAS

SEQ ID NO: 132157 - protein, 9 aa, Homo sapiens
GLLPPYASC

SEQ ID NO: 132158 - protein, 9 aa, Homo sapiens
LLPPYASCH

SEQ ID NO: 132159 - protein, 9 aa, Homo sapiens
LPPYASCHL

SEQ ID NO: 132160 - protein, 9 aa, Homo sapiens
PPYASCHLT

SEQ ID NO: 132161 - protein, 9 aa, Homo sapiens
PYASCHLTE

SEQ ID NO: 132162 - protein, 9 aa, Homo sapiens
YASCHLTEL

SEQ ID NO: 132163 - protein, 9 aa, Homo sapiens
ASCHLTELY

SEQ ID NO: 132164 - protein, 9 aa, Homo sapiens
SCHLTELYF

SEQ ID NO: 132165 - protein, 9 aa, Homo sapiens
CHLTELYFE

SEQ ID NO: 132166 - protein, 9 aa, Homo sapiens
HLTELYFEK

SEQ ID NO: 132167 - protein, 9 aa, Homo sapiens
LTELYFEKG

SEQ ID NO: 132168 - protein, 9 aa, Homo sapiens
TELYFEKGE

SEQ ID NO: 132169 - protein, 9 aa, Homo sapiens
ELYFEKGEY

SEQ ID NO: 132170 - protein, 9 aa, Homo sapiens
LYFEKGEYF

SEQ ID NO: 132171 - protein, 9 aa, Homo sapiens
YFEKGEYFV

SEQ ID NO: 132172 - protein, 9 aa, Homo sapiens
FEKGEYFVE

SEQ ID NO: 132173 - protein, 9 aa, Homo sapiens
EKGEYFVEM

SEQ ID NO: 132174 - protein, 9 aa, Homo sapiens
KGEYFVEMH

SEQ ID NO: 132175 - protein, 9 aa, Homo sapiens
GEYFVEMHY

SEQ ID NO: 132176 - protein, 9 aa, Homo sapiens
EYFVEMHYR

SEQ ID NO: 132177 - protein, 9 aa, Homo sapiens
YFVEMHYRN

SEQ ID NO: 132178 - protein, 9 aa, Homo sapiens
FVEMHYRNE

SEQ ID NO: 132179 - protein, 9 aa, Homo sapiens
VEMHYRNET

SEQ ID NO: 132180 - protein, 9 aa, Homo sapiens
EMHYRNETQ

SEQ ID NO: 132181 - protein, 9 aa, Homo sapiens
MHYRNETQH

SEQ ID NO: 132182 - protein, 9 aa, Homo sapiens
HYRNETQHE

SEQ ID NO: 132183 - protein, 9 aa, Homo sapiens
YRNETQHEP

SEQ ID NO: 132184 - protein, 9 aa, Homo sapiens
RNETQHEPY

SEQ ID NO: 132185 - protein, 9 aa, Homo sapiens
NETQHEPYP

SEQ ID NO: 132186 - protein, 9 aa, Homo sapiens
ETQHEPYPL

SEQ ID NO: 132187 - protein, 9 aa, Homo sapiens
TQHEPYPLM

SEQ ID NO: 132188 - protein, 9 aa, Homo sapiens
QHEPYPLML

SEQ ID NO: 132189 - protein, 9 aa, Homo sapiens
HEPYPLMLP

SEQ ID NO: 132190 - protein, 9 aa, Homo sapiens
EPYPLMLPG

SEQ ID NO: 132191 - protein, 9 aa, Homo sapiens
PYPLMLPGC

SEQ ID NO: 132192 - protein, 9 aa, Homo sapiens
YPLMLPGCS

SEQ ID NO: 132193 - protein, 9 aa, Homo sapiens
PLMLPGCSP

SEQ ID NO: 132194 - protein, 9 aa, Homo sapiens
LMLPGCSPS

SEQ ID NO: 132195 - protein, 9 aa, Homo sapiens
MLPGCSPSC

SEQ ID NO: 132196 - protein, 9 aa, Homo sapiens
LPGCSPSCP

SEQ ID NO: 132197 - protein, 9 aa, Homo sapiens
PGCSPSCPL

SEQ ID NO: 132198 - protein, 9 aa, Homo sapiens
GCSPSCPLE

SEQ ID NO: 132199 - protein, 9 aa, Homo sapiens
CSPSCPLER

SEQ ID NO: 132200 - protein, 9 aa, Homo sapiens
SPSCPLERF

SEQ ID NO: 132201 - protein, 9 aa, Homo sapiens
PSCPLERFA

SEQ ID NO: 132202 - protein, 9 aa, Homo sapiens
SCPLERFAE

SEQ ID NO: 132203 - protein, 9 aa, Homo sapiens
CPLERFAEL

SEQ ID NO: 132204 - protein, 9 aa, Homo sapiens
PLERFAELV

SEQ ID NO: 132205 - protein, 9 aa, Homo sapiens
LERFAELVG

SEQ ID NO: 132206 - protein, 9 aa, Homo sapiens
ERFAELVGP

SEQ ID NO: 132207 - protein, 9 aa, Homo sapiens
RFAELVGPV

SEQ ID NO: 132208 - protein, 9 aa, Homo sapiens
FAELVGPVI

SEQ ID NO: 132209 - protein, 9 aa, Homo sapiens
AELVGPVIP

SEQ ID NO: 132210 - protein, 9 aa, Homo sapiens
ELVGPVIPQ

SEQ ID NO: 132211 - protein, 9 aa, Homo sapiens
LVGPVIPQD

SEQ ID NO: 132212 - protein, 9 aa, Homo sapiens
VGPVIPQDW

SEQ ID NO: 132213 - protein, 9 aa, Homo sapiens
GPVIPQDWS

SEQ ID NO: 132214 - protein, 9 aa, Homo sapiens
PVIPQDWST

SEQ ID NO: 132215 - protein, 9 aa, Homo sapiens
VIPQDWSTE

SEQ ID NO: 132216 - protein, 9 aa, Homo sapiens
IPQDWSTEC

SEQ ID NO: 132217 - protein, 9 aa, Homo sapiens
PQDWSTECM

SEQ ID NO: 132218 - protein, 9 aa, Homo sapiens
QDWSTECMT

SEQ ID NO: 132219 - protein, 9 aa, Homo sapiens
DWSTECMTT

SEQ ID NO: 132220 - protein, 9 aa, Homo sapiens
WSTECMTTN

SEQ ID NO: 132221 - protein, 9 aa, Homo sapiens
STECMTTNS

SEQ ID NO: 132222 - protein, 9 aa, Homo sapiens
TECMTTNSH

SEQ ID NO: 132223 - protein, 9 aa, Homo sapiens
ECMTTNSHQ

SEQ ID NO: 132224 - protein, 9 aa, Homo sapiens
CMTTNSHQG

SEQ ID NO: 132225 - protein, 9 aa, Homo sapiens
MTTNSHQGT

SEQ ID NO: 132226 - protein, 9 aa, Homo sapiens
TTNSHQGTE

SEQ ID NO: 132227 - protein, 9 aa, Homo sapiens
TNSHQGTED

SEQ ID NO: 132228 - protein, 9 aa, Homo sapiens
NSHQGTEDS

SEQ ID NO: 132229 - protein, 9 aa, Homo sapiens
SHQGTEDST

SEQ ID NO: 132230 - protein, 9 aa, Homo sapiens
HQGTEDSTD

SEQ ID NO: 132231 - protein, 9 aa, Homo sapiens
MRAAPLLLA

SEQ ID NO: 132232 - protein, 9 aa, Homo sapiens
RAAPLLLAR

SEQ ID NO: 132233 - protein, 9 aa, Homo sapiens
AAPLLLARA

SEQ ID NO: 132234 - protein, 9 aa, Homo sapiens
APLLLARAA

SEQ ID NO: 132235 - protein, 9 aa, Homo sapiens
PLLLARAAS

SEQ ID NO: 132236 - protein, 9 aa, Homo sapiens
LLLARAASL

SEQ ID NO: 132237 - protein, 9 aa, Homo sapiens
LLARAASLS

SEQ ID NO: 132238 - protein, 9 aa, Homo sapiens
LARAASLSL

SEQ ID NO: 132239 - protein, 9 aa, Homo sapiens
ARAASLSLG

SEQ ID NO: 132240 - protein, 9 aa, Homo sapiens
RAASLSLGF

SEQ ID NO: 132241 - protein, 9 aa, Homo sapiens
AASLSLGFL

SEQ ID NO: 132242 - protein, 9 aa, Homo sapiens
ASLSLGFLF

SEQ ID NO: 132243 - protein, 9 aa, Homo sapiens
SLSLGFLFL

SEQ ID NO: 132244 - protein, 9 aa, Homo sapiens
LSLGFLFLL

SEQ ID NO: 132245 - protein, 9 aa, Homo sapiens
SLGFLFLLF

SEQ ID NO: 132246 - protein, 9 aa, Homo sapiens
LGFLFLLFF

SEQ ID NO: 132247 - protein, 9 aa, Homo sapiens
GFLFLLFFW

SEQ ID NO: 132248 - protein, 9 aa, Homo sapiens
FLFLLFFWL

SEQ ID NO: 132249 - protein, 9 aa, Homo sapiens
LFLLFFWLD

SEQ ID NO: 132250 - protein, 9 aa, Homo sapiens
FLLFFWLDR

SEQ ID NO: 132251 - protein, 9 aa, Homo sapiens
LLFFWLDRS

SEQ ID NO: 132252 - protein, 9 aa, Homo sapiens
LFFWLDRSV

SEQ ID NO: 132253 - protein, 9 aa, Homo sapiens
FFWLDRSVL

SEQ ID NO: 132254 - protein, 9 aa, Homo sapiens
FWLDRSVLA

SEQ ID NO: 132255 - protein, 9 aa, Homo sapiens
WLDRSVLAK

SEQ ID NO: 132256 - protein, 9 aa, Homo sapiens
LDRSVLAKE

SEQ ID NO: 132257 - protein, 9 aa, Homo sapiens
DRSVLAKEL

SEQ ID NO: 132258 - protein, 9 aa, Homo sapiens
RSVLAKELK

SEQ ID NO: 132259 - protein, 9 aa, Homo sapiens
SVLAKELKF

SEQ ID NO: 132260 - protein, 9 aa, Homo sapiens
VLAKELKFV

SEQ ID NO: 132261 - protein, 9 aa, Homo sapiens
LAKELKFVT

SEQ ID NO: 132262 - protein, 9 aa, Homo sapiens
AKELKFVTL

SEQ ID NO: 132263 - protein, 9 aa, Homo sapiens
KELKFVTLV

SEQ ID NO: 132264 - protein, 9 aa, Homo sapiens
ELKFVTLVF

SEQ ID NO: 132265 - protein, 9 aa, Homo sapiens
LKFVTLVFR

SEQ ID NO: 132266 - protein, 9 aa, Homo sapiens
KFVTLVFRH

SEQ ID NO: 132267 - protein, 9 aa, Homo sapiens
FVTLVFRHG

SEQ ID NO: 132268 - protein, 9 aa, Homo sapiens
VTLVFRHGD

SEQ ID NO: 132269 - protein, 9 aa, Homo sapiens
TLVFRHGDR

SEQ ID NO: 132270 - protein, 9 aa, Homo sapiens
LVFRHGDRS

SEQ ID NO: 132271 - protein, 9 aa, Homo sapiens
VFRHGDRSP

SEQ ID NO: 132272 - protein, 9 aa, Homo sapiens
FRHGDRSPI

SEQ ID NO: 132273 - protein, 9 aa, Homo sapiens
RHGDRSPID

SEQ ID NO: 132274 - protein, 9 aa, Homo sapiens
HGDRSPIDT

SEQ ID NO: 132275 - protein, 9 aa, Homo sapiens
GDRSPIDTF

SEQ ID NO: 132276 - protein, 9 aa, Homo sapiens
DRSPIDTFP

SEQ ID NO: 132277 - protein, 9 aa, Homo sapiens
RSPIDTFPT

SEQ ID NO: 132278 - protein, 9 aa, Homo sapiens
SPIDTFPTD

SEQ ID NO: 132279 - protein, 9 aa, Homo sapiens
PIDTFPTDP

SEQ ID NO: 132280 - protein, 9 aa, Homo sapiens
IDTFPTDPI

SEQ ID NO: 132281 - protein, 9 aa, Homo sapiens
DTFPTDPIK

SEQ ID NO: 132282 - protein, 9 aa, Homo sapiens
TFPTDPIKE

SEQ ID NO: 132283 - protein, 9 aa, Homo sapiens
FPTDPIKES

SEQ ID NO: 132284 - protein, 9 aa, Homo sapiens
PTDPIKESS

SEQ ID NO: 132285 - protein, 9 aa, Homo sapiens
TDPIKESSW

SEQ ID NO: 132286 - protein, 9 aa, Homo sapiens
DPIKESSWP

SEQ ID NO: 132287 - protein, 9 aa, Homo sapiens
PIKESSWPQ

SEQ ID NO: 132288 - protein, 9 aa, Homo sapiens
IKESSWPQG

SEQ ID NO: 132289 - protein, 9 aa, Homo sapiens
KESSWPQGF

SEQ ID NO: 132290 - protein, 9 aa, Homo sapiens
ESSWPQGFG

SEQ ID NO: 132291 - protein, 9 aa, Homo sapiens
SSWPQGFGQ

SEQ ID NO: 132292 - protein, 9 aa, Homo sapiens
SWPQGFGQL

SEQ ID NO: 132293 - protein, 9 aa, Homo sapiens
WPQGFGQLT

SEQ ID NO: 132294 - protein, 9 aa, Homo sapiens
PQGFGQLTQ

SEQ ID NO: 132295 - protein, 9 aa, Homo sapiens
QGFGQLTQL

SEQ ID NO: 132296 - protein, 9 aa, Homo sapiens
GFGQLTQLG

SEQ ID NO: 132297 - protein, 9 aa, Homo sapiens
FGQLTQLGM

SEQ ID NO: 132298 - protein, 9 aa, Homo sapiens
GQLTQLGME

SEQ ID NO: 132299 - protein, 9 aa, Homo sapiens
QLTQLGMEQ

SEQ ID NO: 132300 - protein, 9 aa, Homo sapiens
LTQLGMEQH

SEQ ID NO: 132301 - protein, 9 aa, Homo sapiens
TQLGMEQHY

SEQ ID NO: 132302 - protein, 9 aa, Homo sapiens
QLGMEQHYE

SEQ ID NO: 132303 - protein, 9 aa, Homo sapiens
LGMEQHYEL

SEQ ID NO: 132304 - protein, 9 aa, Homo sapiens
GMEQHYELG

SEQ ID NO: 132305 - protein, 9 aa, Homo sapiens
MEQHYELGE

SEQ ID NO: 132306 - protein, 9 aa, Homo sapiens
EQHYELGEY

SEQ ID NO: 132307 - protein, 9 aa, Homo sapiens
QHYELGEYI

SEQ ID NO: 132308 - protein, 9 aa, Homo sapiens
HYELGEYIR

SEQ ID NO: 132309 - protein, 9 aa, Homo sapiens
YELGEYIRK

SEQ ID NO: 132310 - protein, 9 aa, Homo sapiens
ELGEYIRKR

SEQ ID NO: 132311 - protein, 9 aa, Homo sapiens
LGEYIRKRY

SEQ ID NO: 132312 - protein, 9 aa, Homo sapiens
GEYIRKRYR

SEQ ID NO: 132313 - protein, 9 aa, Homo sapiens
EYIRKRYRK

SEQ ID NO: 132314 - protein, 9 aa, Homo sapiens
YIRKRYRKF

SEQ ID NO: 132315 - protein, 9 aa, Homo sapiens
IRKRYRKFL

SEQ ID NO: 132316 - protein, 9 aa, Homo sapiens
RKRYRKFLN

SEQ ID NO: 132317 - protein, 9 aa, Homo sapiens
KRYRKFLNE

SEQ ID NO: 132318 - protein, 9 aa, Homo sapiens
RYRKFLNES

SEQ ID NO: 132319 - protein, 9 aa, Homo sapiens
YRKFLNESY

SEQ ID NO: 132320 - protein, 9 aa, Homo sapiens
RKFLNESYK

SEQ ID NO: 132321 - protein, 9 aa, Homo sapiens
KFLNESYKH

SEQ ID NO: 132322 - protein, 9 aa, Homo sapiens
FLNESYKHE

SEQ ID NO: 132323 - protein, 9 aa, Homo sapiens
LNESYKHEQ

SEQ ID NO: 132324 - protein, 9 aa, Homo sapiens
NESYKHEQV

SEQ ID NO: 132325 - protein, 9 aa, Homo sapiens
ESYKHEQVY

SEQ ID NO: 132326 - protein, 9 aa, Homo sapiens
SYKHEQVYI

SEQ ID NO: 132327 - protein, 9 aa, Homo sapiens
YKHEQVYIR

SEQ ID NO: 132328 - protein, 9 aa, Homo sapiens
KHEQVYIRS

SEQ ID NO: 132329 - protein, 9 aa, Homo sapiens
HEQVYIRST

SEQ ID NO: 132330 - protein, 9 aa, Homo sapiens
EQVYIRSTD

SEQ ID NO: 132331 - protein, 9 aa, Homo sapiens
QVYIRSTDV

SEQ ID NO: 132332 - protein, 9 aa, Homo sapiens
VYIRSTDVD

SEQ ID NO: 132333 - protein, 9 aa, Homo sapiens
YIRSTDVDR

SEQ ID NO: 132334 - protein, 9 aa, Homo sapiens
IRSTDVDRT

SEQ ID NO: 132335 - protein, 9 aa, Homo sapiens
RSTDVDRTL

SEQ ID NO: 132336 - protein, 9 aa, Homo sapiens
STDVDRTLM

SEQ ID NO: 132337 - protein, 9 aa, Homo sapiens
TDVDRTLMS

SEQ ID NO: 132338 - protein, 9 aa, Homo sapiens
DVDRTLMSA

SEQ ID NO: 132339 - protein, 9 aa, Homo sapiens
VDRTLMSAM

SEQ ID NO: 132340 - protein, 9 aa, Homo sapiens
DRTLMSAMT

SEQ ID NO: 132341 - protein, 9 aa, Homo sapiens
RTLMSAMTN

SEQ ID NO: 132342 - protein, 9 aa, Homo sapiens
TLMSAMTNL

SEQ ID NO: 132343 - protein, 9 aa, Homo sapiens
LMSAMTNLA

SEQ ID NO: 132344 - protein, 9 aa, Homo sapiens
MSAMTNLAA

SEQ ID NO: 132345 - protein, 9 aa, Homo sapiens
SAMTNLAAL

SEQ ID NO: 132346 - protein, 9 aa, Homo sapiens
AMTNLAALF

SEQ ID NO: 132347 - protein, 9 aa, Homo sapiens
MTNLAALFP

SEQ ID NO: 132348 - protein, 9 aa, Homo sapiens
TNLAALFPP

SEQ ID NO: 132349 - protein, 9 aa, Homo sapiens
NLAALFPPE

SEQ ID NO: 132350 - protein, 9 aa, Homo sapiens
LAALFPPEG

SEQ ID NO: 132351 - protein, 9 aa, Homo sapiens
AALFPPEGV

SEQ ID NO: 132352 - protein, 9 aa, Homo sapiens
ALFPPEGVS

SEQ ID NO: 132353 - protein, 9 aa, Homo sapiens
LFPPEGVSI

SEQ ID NO: 132354 - protein, 9 aa, Homo sapiens
FPPEGVSIW

SEQ ID NO: 132355 - protein, 9 aa, Homo sapiens
PPEGVSIWN

SEQ ID NO: 132356 - protein, 9 aa, Homo sapiens
PEGVSIWNP

SEQ ID NO: 132357 - protein, 9 aa, Homo sapiens
EGVSIWNPI

SEQ ID NO: 132358 - protein, 9 aa, Homo sapiens
GVSIWNPIL

SEQ ID NO: 132359 - protein, 9 aa, Homo sapiens
VSIWNPILL

SEQ ID NO: 132360 - protein, 9 aa, Homo sapiens
SIWNPILLW

SEQ ID NO: 132361 - protein, 9 aa, Homo sapiens
IWNPILLWQ

SEQ ID NO: 132362 - protein, 9 aa, Homo sapiens
WNPILLWQP

SEQ ID NO: 132363 - protein, 9 aa, Homo sapiens
NPILLWQPI

SEQ ID NO: 132364 - protein, 9 aa, Homo sapiens
PILLWQPIP

SEQ ID NO: 132365 - protein, 9 aa, Homo sapiens
ILLWQPIPV

SEQ ID NO: 132366 - protein, 9 aa, Homo sapiens
LLWQPIPVH

SEQ ID NO: 132367 - protein, 9 aa, Homo sapiens
LWQPIPVHT

SEQ ID NO: 132368 - protein, 9 aa, Homo sapiens
WQPIPVHTV

SEQ ID NO: 132369 - protein, 9 aa, Homo sapiens
QPIPVHTVP

SEQ ID NO: 132370 - protein, 9 aa, Homo sapiens
PIPVHTVPL

SEQ ID NO: 132371 - protein, 9 aa, Homo sapiens
IPVHTVPLS

SEQ ID NO: 132372 - protein, 9 aa, Homo sapiens
PVHTVPLSE

SEQ ID NO: 132373 - protein, 9 aa, Homo sapiens
VHTVPLSED

SEQ ID NO: 132374 - protein, 9 aa, Homo sapiens
HTVPLSEDQ

SEQ ID NO: 132375 - protein, 9 aa, Homo sapiens
TVPLSEDQL

SEQ ID NO: 132376 - protein, 9 aa, Homo sapiens
VPLSEDQLL

SEQ ID NO: 132377 - protein, 9 aa, Homo sapiens
PLSEDQLLY

SEQ ID NO: 132378 - protein, 9 aa, Homo sapiens
LSEDQLLYL

SEQ ID NO: 132379 - protein, 9 aa, Homo sapiens
SEDQLLYLP

SEQ ID NO: 132380 - protein, 9 aa, Homo sapiens
EDQLLYLPF

SEQ ID NO: 132381 - protein, 9 aa, Homo sapiens
DQLLYLPFR

SEQ ID NO: 132382 - protein, 9 aa, Homo sapiens
QLLYLPFRN

SEQ ID NO: 132383 - protein, 9 aa, Homo sapiens
LLYLPFRNC

SEQ ID NO: 132384 - protein, 9 aa, Homo sapiens
LYLPFRNCP

SEQ ID NO: 132385 - protein, 9 aa, Homo sapiens
YLPFRNCPR

SEQ ID NO: 132386 - protein, 9 aa, Homo sapiens
LPFRNCPRF

SEQ ID NO: 132387 - protein, 9 aa, Homo sapiens
PFRNCPRFQ

SEQ ID NO: 132388 - protein, 9 aa, Homo sapiens
FRNCPRFQE

SEQ ID NO: 132389 - protein, 9 aa, Homo sapiens
RNCPRFQEL

SEQ ID NO: 132390 - protein, 9 aa, Homo sapiens
NCPRFQELE

SEQ ID NO: 132391 - protein, 9 aa, Homo sapiens
CPRFQELES

SEQ ID NO: 132392 - protein, 9 aa, Homo sapiens
PRFQELESE

SEQ ID NO: 132393 - protein, 9 aa, Homo sapiens
RFQELESET

SEQ ID NO: 132394 - protein, 9 aa, Homo sapiens
FQELESETL

SEQ ID NO: 132395 - protein, 9 aa, Homo sapiens
QELESETLK

SEQ ID NO: 132396 - protein, 9 aa, Homo sapiens
ELESETLKS

SEQ ID NO: 132397 - protein, 9 aa, Homo sapiens
LESETLKSE

SEQ ID NO: 132398 - protein, 9 aa, Homo sapiens
ESETLKSEE

SEQ ID NO: 132399 - protein, 9 aa, Homo sapiens
SETLKSEEF

SEQ ID NO: 132400 - protein, 9 aa, Homo sapiens
ETLKSEEFQ

SEQ ID NO: 132401 - protein, 9 aa, Homo sapiens
TLKSEEFQK

SEQ ID NO: 132402 - protein, 9 aa, Homo sapiens
LKSEEFQKR

SEQ ID NO: 132403 - protein, 9 aa, Homo sapiens
KSEEFQKRL

SEQ ID NO: 132404 - protein, 9 aa, Homo sapiens
SEEFQKRLH

SEQ ID NO: 132405 - protein, 9 aa, Homo sapiens
EEFQKRLHP

SEQ ID NO: 132406 - protein, 9 aa, Homo sapiens
EFQKRLHPY

SEQ ID NO: 132407 - protein, 9 aa, Homo sapiens
FQKRLHPYK

SEQ ID NO: 132408 - protein, 9 aa, Homo sapiens
QKRLHPYKD

SEQ ID NO: 132409 - protein, 9 aa, Homo sapiens
KRLHPYKDF

SEQ ID NO: 132410 - protein, 9 aa, Homo sapiens
RLHPYKDFI

SEQ ID NO: 132411 - protein, 9 aa, Homo sapiens
LHPYKDFIA

SEQ ID NO: 132412 - protein, 9 aa, Homo sapiens
HPYKDFIAT

SEQ ID NO: 132413 - protein, 9 aa, Homo sapiens
PYKDFIATL

SEQ ID NO: 132414 - protein, 9 aa, Homo sapiens
YKDFIATLG

SEQ ID NO: 132415 - protein, 9 aa, Homo sapiens
KDFIATLGK

SEQ ID NO: 132416 - protein, 9 aa, Homo sapiens
DFIATLGKL

SEQ ID NO: 132417 - protein, 9 aa, Homo sapiens
FIATLGKLS

SEQ ID NO: 132418 - protein, 9 aa, Homo sapiens
IATLGKLSG

SEQ ID NO: 132419 - protein, 9 aa, Homo sapiens
ATLGKLSGL

SEQ ID NO: 132420 - protein, 9 aa, Homo sapiens
TLGKLSGLH

SEQ ID NO: 132421 - protein, 9 aa, Homo sapiens
LGKLSGLHG

SEQ ID NO: 132422 - protein, 9 aa, Homo sapiens
GKLSGLHGQ

SEQ ID NO: 132423 - protein, 9 aa, Homo sapiens
KLSGLHGQD

SEQ ID NO: 132424 - protein, 9 aa, Homo sapiens
LSGLHGQDL

SEQ ID NO: 132425 - protein, 9 aa, Homo sapiens
SGLHGQDLF

SEQ ID NO: 132426 - protein, 9 aa, Homo sapiens
GLHGQDLFG

SEQ ID NO: 132427 - protein, 9 aa, Homo sapiens
LHGQDLFGI

SEQ ID NO: 132428 - protein, 9 aa, Homo sapiens
HGQDLFGIW

SEQ ID NO: 132429 - protein, 9 aa, Homo sapiens
GQDLFGIWS

SEQ ID NO: 132430 - protein, 9 aa, Homo sapiens
QDLFGIWSK

SEQ ID NO: 132431 - protein, 9 aa, Homo sapiens
DLFGIWSKV

SEQ ID NO: 132432 - protein, 9 aa, Homo sapiens
LFGIWSKVY

SEQ ID NO: 132433 - protein, 9 aa, Homo sapiens
FGIWSKVYD

SEQ ID NO: 132434 - protein, 9 aa, Homo sapiens
GIWSKVYDP

SEQ ID NO: 132435 - protein, 9 aa, Homo sapiens
IWSKVYDPL

SEQ ID NO: 132436 - protein, 9 aa, Homo sapiens
WSKVYDPLY

SEQ ID NO: 132437 - protein, 9 aa, Homo sapiens
SKVYDPLYC

SEQ ID NO: 132438 - protein, 9 aa, Homo sapiens
KVYDPLYCE

SEQ ID NO: 132439 - protein, 9 aa, Homo sapiens
VYDPLYCES

SEQ ID NO: 132440 - protein, 9 aa, Homo sapiens
YDPLYCESV

SEQ ID NO: 132441 - protein, 9 aa, Homo sapiens
DPLYCESVH

SEQ ID NO: 132442 - protein, 9 aa, Homo sapiens
PLYCESVHN

SEQ ID NO: 132443 - protein, 9 aa, Homo sapiens
LYCESVHNF

SEQ ID NO: 132444 - protein, 9 aa, Homo sapiens
YCESVHNFT

SEQ ID NO: 132445 - protein, 9 aa, Homo sapiens
CESVHNFTL

SEQ ID NO: 132446 - protein, 9 aa, Homo sapiens
ESVHNFTLP

SEQ ID NO: 132447 - protein, 9 aa, Homo sapiens
SVHNFTLPS

SEQ ID NO: 132448 - protein, 9 aa, Homo sapiens
VHNFTLPSW

SEQ ID NO: 132449 - protein, 9 aa, Homo sapiens
HNFTLPSWA

SEQ ID NO: 132450 - protein, 9 aa, Homo sapiens
NFTLPSWAT

SEQ ID NO: 132451 - protein, 9 aa, Homo sapiens
FTLPSWATE

SEQ ID NO: 132452 - protein, 9 aa, Homo sapiens
TLPSWATED

SEQ ID NO: 132453 - protein, 9 aa, Homo sapiens
LPSWATEDT

SEQ ID NO: 132454 - protein, 9 aa, Homo sapiens
PSWATEDTM

SEQ ID NO: 132455 - protein, 9 aa, Homo sapiens
SWATEDTMT

SEQ ID NO: 132456 - protein, 9 aa, Homo sapiens
WATEDTMTK

SEQ ID NO: 132457 - protein, 9 aa, Homo sapiens
ATEDTMTKL

SEQ ID NO: 132458 - protein, 9 aa, Homo sapiens
TEDTMTKLR

SEQ ID NO: 132459 - protein, 9 aa, Homo sapiens
EDTMTKLRE

SEQ ID NO: 132460 - protein, 9 aa, Homo sapiens
DTMTKLREL

SEQ ID NO: 132461 - protein, 9 aa, Homo sapiens
TMTKLRELS

SEQ ID NO: 132462 - protein, 9 aa, Homo sapiens
MTKLRELSE

SEQ ID NO: 132463 - protein, 9 aa, Homo sapiens
TKLRELSEL

SEQ ID NO: 132464 - protein, 9 aa, Homo sapiens
KLRELSELS

SEQ ID NO: 132465 - protein, 9 aa, Homo sapiens
LRELSELSL

SEQ ID NO: 132466 - protein, 9 aa, Homo sapiens
RELSELSLL

SEQ ID NO: 132467 - protein, 9 aa, Homo sapiens
ELSELSLLS

SEQ ID NO: 132468 - protein, 9 aa, Homo sapiens
LSELSLLSL

SEQ ID NO: 132469 - protein, 9 aa, Homo sapiens
SELSLLSLY

SEQ ID NO: 132470 - protein, 9 aa, Homo sapiens
ELSLLSLYG

SEQ ID NO: 132471 - protein, 9 aa, Homo sapiens
LSLLSLYGI

SEQ ID NO: 132472 - protein, 9 aa, Homo sapiens
SLLSLYGIH

SEQ ID NO: 132473 - protein, 9 aa, Homo sapiens
LLSLYGIHK

SEQ ID NO: 132474 - protein, 9 aa, Homo sapiens
LSLYGIHKQ

SEQ ID NO: 132475 - protein, 9 aa, Homo sapiens
SLYGIHKQK

SEQ ID NO: 132476 - protein, 9 aa, Homo sapiens
LYGIHKQKE

SEQ ID NO: 132477 - protein, 9 aa, Homo sapiens
YGIHKQKEK

SEQ ID NO: 132478 - protein, 9 aa, Homo sapiens
GIHKQKEKS

SEQ ID NO: 132479 - protein, 9 aa, Homo sapiens
IHKQKEKSR

SEQ ID NO: 132480 - protein, 9 aa, Homo sapiens
HKQKEKSRL

SEQ ID NO: 132481 - protein, 9 aa, Homo sapiens
KQKEKSRLQ

SEQ ID NO: 132482 - protein, 9 aa, Homo sapiens
QKEKSRLQG

SEQ ID NO: 132483 - protein, 9 aa, Homo sapiens
KEKSRLQGG

SEQ ID NO: 132484 - protein, 9 aa, Homo sapiens
EKSRLQGGV

SEQ ID NO: 132485 - protein, 9 aa, Homo sapiens
KSRLQGGVL

SEQ ID NO: 132486 - protein, 9 aa, Homo sapiens
SRLQGGVLV

SEQ ID NO: 132487 - protein, 9 aa, Homo sapiens
RLQGGVLVN

SEQ ID NO: 132488 - protein, 9 aa, Homo sapiens
LQGGVLVNE

SEQ ID NO: 132489 - protein, 9 aa, Homo sapiens
QGGVLVNEI

SEQ ID NO: 132490 - protein, 9 aa, Homo sapiens
GGVLVNEIL

SEQ ID NO: 132491 - protein, 9 aa, Homo sapiens
GVLVNEILN

SEQ ID NO: 132492 - protein, 9 aa, Homo sapiens
VLVNEILNH

SEQ ID NO: 132493 - protein, 9 aa, Homo sapiens
LVNEILNHM

SEQ ID NO: 132494 - protein, 9 aa, Homo sapiens
VNEILNHMK

SEQ ID NO: 132495 - protein, 9 aa, Homo sapiens
NEILNHMKR

SEQ ID NO: 132496 - protein, 9 aa, Homo sapiens
EILNHMKRA

SEQ ID NO: 132497 - protein, 9 aa, Homo sapiens
ILNHMKRAT

SEQ ID NO: 132498 - protein, 9 aa, Homo sapiens
LNHMKRATQ

SEQ ID NO: 132499 - protein, 9 aa, Homo sapiens
NHMKRATQI

SEQ ID NO: 132500 - protein, 9 aa, Homo sapiens
HMKRATQIP

SEQ ID NO: 132501 - protein, 9 aa, Homo sapiens
MKRATQIPS

SEQ ID NO: 132502 - protein, 9 aa, Homo sapiens
KRATQIPSY

SEQ ID NO: 132503 - protein, 9 aa, Homo sapiens
RATQIPSYK

SEQ ID NO: 132504 - protein, 9 aa, Homo sapiens
ATQIPSYKK

SEQ ID NO: 132505 - protein, 9 aa, Homo sapiens
TQIPSYKKL

SEQ ID NO: 132506 - protein, 9 aa, Homo sapiens
QIPSYKKLI

SEQ ID NO: 132507 - protein, 9 aa, Homo sapiens
IPSYKKLIM

SEQ ID NO: 132508 - protein, 9 aa, Homo sapiens
PSYKKLIMY

SEQ ID NO: 132509 - protein, 9 aa, Homo sapiens
SYKKLIMYS

SEQ ID NO: 132510 - protein, 9 aa, Homo sapiens
YKKLIMYSA

SEQ ID NO: 132511 - protein, 9 aa, Homo sapiens
KKLIMYSAH

SEQ ID NO: 132512 - protein, 9 aa, Homo sapiens
KLIMYSAHD

SEQ ID NO: 132513 - protein, 9 aa, Homo sapiens
LIMYSAHDT

SEQ ID NO: 132514 - protein, 9 aa, Homo sapiens
IMYSAHDTT

SEQ ID NO: 132515 - protein, 9 aa, Homo sapiens
MYSAHDTTV

SEQ ID NO: 132516 - protein, 9 aa, Homo sapiens
YSAHDTTVS

SEQ ID NO: 132517 - protein, 9 aa, Homo sapiens
SAHDTTVSG

SEQ ID NO: 132518 - protein, 9 aa, Homo sapiens
AHDTTVSGL

SEQ ID NO: 132519 - protein, 9 aa, Homo sapiens
HDTTVSGLQ

SEQ ID NO: 132520 - protein, 9 aa, Homo sapiens
DTTVSGLQM

SEQ ID NO: 132521 - protein, 9 aa, Homo sapiens
TTVSGLQMA

SEQ ID NO: 132522 - protein, 9 aa, Homo sapiens
TVSGLQMAL

SEQ ID NO: 132523 - protein, 9 aa, Homo sapiens
VSGLQMALD

SEQ ID NO: 132524 - protein, 9 aa, Homo sapiens
SGLQMALDV

SEQ ID NO: 132525 - protein, 9 aa, Homo sapiens
GLQMALDVY

SEQ ID NO: 132526 - protein, 9 aa, Homo sapiens
LQMALDVYN

SEQ ID NO: 132527 - protein, 9 aa, Homo sapiens
QMALDVYNG

SEQ ID NO: 132528 - protein, 9 aa, Homo sapiens
MALDVYNGL

SEQ ID NO: 132529 - protein, 9 aa, Homo sapiens
ALDVYNGLL

SEQ ID NO: 132530 - protein, 9 aa, Homo sapiens
LDVYNGLLP

SEQ ID NO: 132531 - protein, 9 aa, Homo sapiens
DVYNGLLPP

SEQ ID NO: 132532 - protein, 9 aa, Homo sapiens
VYNGLLPPY

SEQ ID NO: 132533 - protein, 9 aa, Homo sapiens
YNGLLPPYA

SEQ ID NO: 132534 - protein, 9 aa, Homo sapiens
NGLLPPYAS

SEQ ID NO: 132535 - protein, 9 aa, Homo sapiens
GLLPPYASC

SEQ ID NO: 132536 - protein, 9 aa, Homo sapiens
LLPPYASCH

SEQ ID NO: 132537 - protein, 9 aa, Homo sapiens
LPPYASCHL

SEQ ID NO: 132538 - protein, 9 aa, Homo sapiens
PPYASCHLT

SEQ ID NO: 132539 - protein, 9 aa, Homo sapiens
PYASCHLTE

SEQ ID NO: 132540 - protein, 9 aa, Homo sapiens
YASCHLTEL

SEQ ID NO: 132541 - protein, 9 aa, Homo sapiens
ASCHLTELY

SEQ ID NO: 132542 - protein, 9 aa, Homo sapiens
SCHLTELYF

SEQ ID NO: 132543 - protein, 9 aa, Homo sapiens
CHLTELYFE

SEQ ID NO: 132544 - protein, 9 aa, Homo sapiens
HLTELYFEK

SEQ ID NO: 132545 - protein, 9 aa, Homo sapiens
LTELYFEKG

SEQ ID NO: 132546 - protein, 9 aa, Homo sapiens
TELYFEKGE

SEQ ID NO: 132547 - protein, 9 aa, Homo sapiens
ELYFEKGEY

SEQ ID NO: 132548 - protein, 9 aa, Homo sapiens
LYFEKGEYF

SEQ ID NO: 132549 - protein, 9 aa, Homo sapiens
YFEKGEYFV

SEQ ID NO: 132550 - protein, 9 aa, Homo sapiens
FEKGEYFVE

SEQ ID NO: 132551 - protein, 9 aa, Homo sapiens
EKGEYFVEM

SEQ ID NO: 132552 - protein, 9 aa, Homo sapiens
KGEYFVEMY

SEQ ID NO: 132553 - protein, 9 aa, Homo sapiens
GEYFVEMYY

SEQ ID NO: 132554 - protein, 9 aa, Homo sapiens
EYFVEMYYR

SEQ ID NO: 132555 - protein, 9 aa, Homo sapiens
YFVEMYYRN

SEQ ID NO: 132556 - protein, 9 aa, Homo sapiens
FVEMYYRNE

SEQ ID NO: 132557 - protein, 9 aa, Homo sapiens
VEMYYRNET

SEQ ID NO: 132558 - protein, 9 aa, Homo sapiens
EMYYRNETQ

SEQ ID NO: 132559 - protein, 9 aa, Homo sapiens
MYYRNETQH

SEQ ID NO: 132560 - protein, 9 aa, Homo sapiens
YYRNETQHE

SEQ ID NO: 132561 - protein, 9 aa, Homo sapiens
YRNETQHEP

SEQ ID NO: 132562 - protein, 9 aa, Homo sapiens
RNETQHEPY

SEQ ID NO: 132563 - protein, 9 aa, Homo sapiens
NETQHEPYP

SEQ ID NO: 132564 - protein, 9 aa, Homo sapiens
ETQHEPYPL

SEQ ID NO: 132565 - protein, 9 aa, Homo sapiens
TQHEPYPLM

SEQ ID NO: 132566 - protein, 9 aa, Homo sapiens
QHEPYPLML

SEQ ID NO: 132567 - protein, 9 aa, Homo sapiens
HEPYPLMLP

SEQ ID NO: 132568 - protein, 9 aa, Homo sapiens
EPYPLMLPG

SEQ ID NO: 132569 - protein, 9 aa, Homo sapiens
PYPLMLPGC

SEQ ID NO: 132570 - protein, 9 aa, Homo sapiens
YPLMLPGCS

SEQ ID NO: 132571 - protein, 9 aa, Homo sapiens
PLMLPGCSP

SEQ ID NO: 132572 - protein, 9 aa, Homo sapiens
LMLPGCSPS

SEQ ID NO: 132573 - protein, 9 aa, Homo sapiens
MLPGCSPSC

SEQ ID NO: 132574 - protein, 9 aa, Homo sapiens
LPGCSPSCP

SEQ ID NO: 132575 - protein, 9 aa, Homo sapiens
PGCSPSCPL

SEQ ID NO: 132576 - protein, 9 aa, Homo sapiens
GCSPSCPLE

SEQ ID NO: 132577 - protein, 9 aa, Homo sapiens
CSPSCPLER

SEQ ID NO: 132578 - protein, 9 aa, Homo sapiens
SPSCPLERF

SEQ ID NO: 132579 - protein, 9 aa, Homo sapiens
PSCPLERFA

SEQ ID NO: 132580 - protein, 9 aa, Homo sapiens
SCPLERFAE

SEQ ID NO: 132581 - protein, 9 aa, Homo sapiens
CPLERFAEL

SEQ ID NO: 132582 - protein, 9 aa, Homo sapiens
PLERFAELV

SEQ ID NO: 132583 - protein, 9 aa, Homo sapiens
LERFAELVG

SEQ ID NO: 132584 - protein, 9 aa, Homo sapiens
ERFAELVGP

SEQ ID NO: 132585 - protein, 9 aa, Homo sapiens
RFAELVGPV

SEQ ID NO: 132586 - protein, 9 aa, Homo sapiens
FAELVGPVI

SEQ ID NO: 132587 - protein, 9 aa, Homo sapiens
AELVGPVIP

SEQ ID NO: 132588 - protein, 9 aa, Homo sapiens
ELVGPVIPQ

SEQ ID NO: 132589 - protein, 9 aa, Homo sapiens
LVGPVIPQD

SEQ ID NO: 132590 - protein, 9 aa, Homo sapiens
VGPVIPQDW

SEQ ID NO: 132591 - protein, 9 aa, Homo sapiens
GPVIPQDWS

SEQ ID NO: 132592 - protein, 9 aa, Homo sapiens
PVIPQDWST

SEQ ID NO: 132593 - protein, 9 aa, Homo sapiens
VIPQDWSTE

SEQ ID NO: 132594 - protein, 9 aa, Homo sapiens
IPQDWSTEC

SEQ ID NO: 132595 - protein, 9 aa, Homo sapiens
PQDWSTECM

SEQ ID NO: 132596 - protein, 9 aa, Homo sapiens
QDWSTECMT

SEQ ID NO: 132597 - protein, 9 aa, Homo sapiens
DWSTECMTT

SEQ ID NO: 132598 - protein, 9 aa, Homo sapiens
WSTECMTTN

SEQ ID NO: 132599 - protein, 9 aa, Homo sapiens
STECMTTNS

SEQ ID NO: 132600 - protein, 9 aa, Homo sapiens
TECMTTNSH

SEQ ID NO: 132601 - protein, 9 aa, Homo sapiens
ECMTTNSHQ

SEQ ID NO: 132602 - protein, 9 aa, Homo sapiens
CMTTNSHQV

SEQ ID NO: 132603 - protein, 9 aa, Homo sapiens
MTTNSHQVL

SEQ ID NO: 132604 - protein, 9 aa, Homo sapiens
TTNSHQVLK

SEQ ID NO: 132605 - protein, 9 aa, Homo sapiens
TNSHQVLKV

SEQ ID NO: 132606 - protein, 9 aa, Homo sapiens
NSHQVLKVI

SEQ ID NO: 132607 - protein, 9 aa, Homo sapiens
SHQVLKVIF

SEQ ID NO: 132608 - protein, 9 aa, Homo sapiens
HQVLKVIFA

SEQ ID NO: 132609 - protein, 9 aa, Homo sapiens
QVLKVIFAV

SEQ ID NO: 132610 - protein, 9 aa, Homo sapiens
VLKVIFAVA

SEQ ID NO: 132611 - protein, 9 aa, Homo sapiens
LKVIFAVAF

SEQ ID NO: 132612 - protein, 9 aa, Homo sapiens
KVIFAVAFC

SEQ ID NO: 132613 - protein, 9 aa, Homo sapiens
VIFAVAFCL

SEQ ID NO: 132614 - protein, 9 aa, Homo sapiens
IFAVAFCLI

SEQ ID NO: 132615 - protein, 9 aa, Homo sapiens
FAVAFCLIS

SEQ ID NO: 132616 - protein, 9 aa, Homo sapiens
AVAFCLISA

SEQ ID NO: 132617 - protein, 9 aa, Homo sapiens
VAFCLISAV

SEQ ID NO: 132618 - protein, 9 aa, Homo sapiens
AFCLISAVL

SEQ ID NO: 132619 - protein, 9 aa, Homo sapiens
FCLISAVLM

SEQ ID NO: 132620 - protein, 9 aa, Homo sapiens
CLISAVLMV

SEQ ID NO: 132621 - protein, 9 aa, Homo sapiens
LISAVLMVL

SEQ ID NO: 132622 - protein, 9 aa, Homo sapiens
ISAVLMVLL

SEQ ID NO: 132623 - protein, 9 aa, Homo sapiens
SAVLMVLLF

SEQ ID NO: 132624 - protein, 9 aa, Homo sapiens
AVLMVLLFI

SEQ ID NO: 132625 - protein, 9 aa, Homo sapiens
VLMVLLFIH

SEQ ID NO: 132626 - protein, 9 aa, Homo sapiens
LMVLLFIHI

SEQ ID NO: 132627 - protein, 9 aa, Homo sapiens
MVLLFIHIR

SEQ ID NO: 132628 - protein, 9 aa, Homo sapiens
VLLFIHIRR

SEQ ID NO: 132629 - protein, 9 aa, Homo sapiens
LLFIHIRRG

SEQ ID NO: 132630 - protein, 9 aa, Homo sapiens
LFIHIRRGL

SEQ ID NO: 132631 - protein, 9 aa, Homo sapiens
FIHIRRGLC

SEQ ID NO: 132632 - protein, 9 aa, Homo sapiens
IHIRRGLCW

SEQ ID NO: 132633 - protein, 9 aa, Homo sapiens
HIRRGLCWQ

SEQ ID NO: 132634 - protein, 9 aa, Homo sapiens
IRRGLCWQR

SEQ ID NO: 132635 - protein, 9 aa, Homo sapiens
RRGLCWQRE

SEQ ID NO: 132636 - protein, 9 aa, Homo sapiens
RGLCWQRES

SEQ ID NO: 132637 - protein, 9 aa, Homo sapiens
GLCWQRESY

SEQ ID NO: 132638 - protein, 9 aa, Homo sapiens
LCWQRESYG

SEQ ID NO: 132639 - protein, 9 aa, Homo sapiens
CWQRESYGN

SEQ ID NO: 132640 - protein, 9 aa, Homo sapiens
WQRESYGNI

SEQ ID NO: 132641 - protein, 9 aa, Homo sapiens
MAHRPPSPA

SEQ ID NO: 132642 - protein, 9 aa, Homo sapiens
AHRPPSPAL

SEQ ID NO: 132643 - protein, 9 aa, Homo sapiens
HRPPSPALA

SEQ ID NO: 132644 - protein, 9 aa, Homo sapiens
RPPSPALAS

SEQ ID NO: 132645 - protein, 9 aa, Homo sapiens
PPSPALASV

SEQ ID NO: 132646 - protein, 9 aa, Homo sapiens
PSPALASVL

SEQ ID NO: 132647 - protein, 9 aa, Homo sapiens
SPALASVLL

SEQ ID NO: 132648 - protein, 9 aa, Homo sapiens
PALASVLLA

SEQ ID NO: 132649 - protein, 9 aa, Homo sapiens
ALASVLLAL

SEQ ID NO: 132650 - protein, 9 aa, Homo sapiens
LASVLLALL

SEQ ID NO: 132651 - protein, 9 aa, Homo sapiens
ASVLLALLL

SEQ ID NO: 132652 - protein, 9 aa, Homo sapiens
SVLLALLLS

SEQ ID NO: 132653 - protein, 9 aa, Homo sapiens
VLLALLLSG

SEQ ID NO: 132654 - protein, 9 aa, Homo sapiens
LLALLLSGA

SEQ ID NO: 132655 - protein, 9 aa, Homo sapiens
LALLLSGAA

SEQ ID NO: 132656 - protein, 9 aa, Homo sapiens
ALLLSGAAR

SEQ ID NO: 132657 - protein, 9 aa, Homo sapiens
LLLSGAARA

SEQ ID NO: 132658 - protein, 9 aa, Homo sapiens
LLSGAARAA

SEQ ID NO: 132659 - protein, 9 aa, Homo sapiens
LSGAARAAE

SEQ ID NO: 132660 - protein, 9 aa, Homo sapiens
SGAARAAEI

SEQ ID NO: 132661 - protein, 9 aa, Homo sapiens
GAARAAEIV

SEQ ID NO: 132662 - protein, 9 aa, Homo sapiens
AARAAEIVG

SEQ ID NO: 132663 - protein, 9 aa, Homo sapiens
ARAAEIVGG

SEQ ID NO: 132664 - protein, 9 aa, Homo sapiens
RAAEIVGGH

SEQ ID NO: 132665 - protein, 9 aa, Homo sapiens
AAEIVGGHE

SEQ ID NO: 132666 - protein, 9 aa, Homo sapiens
AEIVGGHEA

SEQ ID NO: 132667 - protein, 9 aa, Homo sapiens
EIVGGHEAQ

SEQ ID NO: 132668 - protein, 9 aa, Homo sapiens
IVGGHEAQP

SEQ ID NO: 132669 - protein, 9 aa, Homo sapiens
VGGHEAQPH

SEQ ID NO: 132670 - protein, 9 aa, Homo sapiens
GGHEAQPHS

SEQ ID NO: 132671 - protein, 9 aa, Homo sapiens
GHEAQPHSR

SEQ ID NO: 132672 - protein, 9 aa, Homo sapiens
HEAQPHSRP

SEQ ID NO: 132673 - protein, 9 aa, Homo sapiens
EAQPHSRPY

SEQ ID NO: 132674 - protein, 9 aa, Homo sapiens
AQPHSRPYM

SEQ ID NO: 132675 - protein, 9 aa, Homo sapiens
QPHSRPYMA

SEQ ID NO: 132676 - protein, 9 aa, Homo sapiens
PHSRPYMAS

SEQ ID NO: 132677 - protein, 9 aa, Homo sapiens
HSRPYMASL

SEQ ID NO: 132678 - protein, 9 aa, Homo sapiens
SRPYMASLQ

SEQ ID NO: 132679 - protein, 9 aa, Homo sapiens
RPYMASLQM

SEQ ID NO: 132680 - protein, 9 aa, Homo sapiens
PYMASLQMR

SEQ ID NO: 132681 - protein, 9 aa, Homo sapiens
YMASLQMRG

SEQ ID NO: 132682 - protein, 9 aa, Homo sapiens
MASLQMRGN

SEQ ID NO: 132683 - protein, 9 aa, Homo sapiens
ASLQMRGNP

SEQ ID NO: 132684 - protein, 9 aa, Homo sapiens
SLQMRGNPG

SEQ ID NO: 132685 - protein, 9 aa, Homo sapiens
LQMRGNPGS

SEQ ID NO: 132686 - protein, 9 aa, Homo sapiens
QMRGNPGSH

SEQ ID NO: 132687 - protein, 9 aa, Homo sapiens
MRGNPGSHF

SEQ ID NO: 132688 - protein, 9 aa, Homo sapiens
RGNPGSHFC

SEQ ID NO: 132689 - protein, 9 aa, Homo sapiens
GNPGSHFCG

SEQ ID NO: 132690 - protein, 9 aa, Homo sapiens
NPGSHFCGG

SEQ ID NO: 132691 - protein, 9 aa, Homo sapiens
PGSHFCGGT

SEQ ID NO: 132692 - protein, 9 aa, Homo sapiens
GSHFCGGTL

SEQ ID NO: 132693 - protein, 9 aa, Homo sapiens
SHFCGGTLI

SEQ ID NO: 132694 - protein, 9 aa, Homo sapiens
HFCGGTLIH

SEQ ID NO: 132695 - protein, 9 aa, Homo sapiens
FCGGTLIHP

SEQ ID NO: 132696 - protein, 9 aa, Homo sapiens
CGGTLIHPS

SEQ ID NO: 132697 - protein, 9 aa, Homo sapiens
GGTLIHPSF

SEQ ID NO: 132698 - protein, 9 aa, Homo sapiens
GTLIHPSFV

SEQ ID NO: 132699 - protein, 9 aa, Homo sapiens
TLIHPSFVL

SEQ ID NO: 132700 - protein, 9 aa, Homo sapiens
LIHPSFVLT

SEQ ID NO: 132701 - protein, 9 aa, Homo sapiens
IHPSFVLTA

SEQ ID NO: 132702 - protein, 9 aa, Homo sapiens
HPSFVLTAA

SEQ ID NO: 132703 - protein, 9 aa, Homo sapiens
PSFVLTAAH

SEQ ID NO: 132704 - protein, 9 aa, Homo sapiens
SFVLTAAHC

SEQ ID NO: 132705 - protein, 9 aa, Homo sapiens
FVLTAAHCL

SEQ ID NO: 132706 - protein, 9 aa, Homo sapiens
VLTAAHCLR

SEQ ID NO: 132707 - protein, 9 aa, Homo sapiens
LTAAHCLRD

SEQ ID NO: 132708 - protein, 9 aa, Homo sapiens
TAAHCLRDI

SEQ ID NO: 132709 - protein, 9 aa, Homo sapiens
AAHCLRDIP

SEQ ID NO: 132710 - protein, 9 aa, Homo sapiens
AHCLRDIPQ

SEQ ID NO: 132711 - protein, 9 aa, Homo sapiens
HCLRDIPQR

SEQ ID NO: 132712 - protein, 9 aa, Homo sapiens
CLRDIPQRL

SEQ ID NO: 132713 - protein, 9 aa, Homo sapiens
LRDIPQRLV

SEQ ID NO: 132714 - protein, 9 aa, Homo sapiens
RDIPQRLVN

SEQ ID NO: 132715 - protein, 9 aa, Homo sapiens
DIPQRLVNV

SEQ ID NO: 132716 - protein, 9 aa, Homo sapiens
IPQRLVNVV

SEQ ID NO: 132717 - protein, 9 aa, Homo sapiens
PQRLVNVVL

SEQ ID NO: 132718 - protein, 9 aa, Homo sapiens
QRLVNVVLG

SEQ ID NO: 132719 - protein, 9 aa, Homo sapiens
RLVNVVLGA

SEQ ID NO: 132720 - protein, 9 aa, Homo sapiens
LVNVVLGAH

SEQ ID NO: 132721 - protein, 9 aa, Homo sapiens
VNVVLGAHN

SEQ ID NO: 132722 - protein, 9 aa, Homo sapiens
NVVLGAHNV

SEQ ID NO: 132723 - protein, 9 aa, Homo sapiens
VVLGAHNVR

SEQ ID NO: 132724 - protein, 9 aa, Homo sapiens
VLGAHNVRT

SEQ ID NO: 132725 - protein, 9 aa, Homo sapiens
LGAHNVRTQ

SEQ ID NO: 132726 - protein, 9 aa, Homo sapiens
GAHNVRTQE

SEQ ID NO: 132727 - protein, 9 aa, Homo sapiens
AHNVRTQEP

SEQ ID NO: 132728 - protein, 9 aa, Homo sapiens
HNVRTQEPT

SEQ ID NO: 132729 - protein, 9 aa, Homo sapiens
NVRTQEPTQ

SEQ ID NO: 132730 - protein, 9 aa, Homo sapiens
VRTQEPTQQ

SEQ ID NO: 132731 - protein, 9 aa, Homo sapiens
RTQEPTQQH

SEQ ID NO: 132732 - protein, 9 aa, Homo sapiens
TQEPTQQHF

SEQ ID NO: 132733 - protein, 9 aa, Homo sapiens
QEPTQQHFS

SEQ ID NO: 132734 - protein, 9 aa, Homo sapiens
EPTQQHFSV

SEQ ID NO: 132735 - protein, 9 aa, Homo sapiens
PTQQHFSVA

SEQ ID NO: 132736 - protein, 9 aa, Homo sapiens
TQQHFSVAQ

SEQ ID NO: 132737 - protein, 9 aa, Homo sapiens
QQHFSVAQV

SEQ ID NO: 132738 - protein, 9 aa, Homo sapiens
QHFSVAQVF

SEQ ID NO: 132739 - protein, 9 aa, Homo sapiens
HFSVAQVFL

SEQ ID NO: 132740 - protein, 9 aa, Homo sapiens
FSVAQVFLN

SEQ ID NO: 132741 - protein, 9 aa, Homo sapiens
SVAQVFLNN

SEQ ID NO: 132742 - protein, 9 aa, Homo sapiens
VAQVFLNNY

SEQ ID NO: 132743 - protein, 9 aa, Homo sapiens
AQVFLNNYD

SEQ ID NO: 132744 - protein, 9 aa, Homo sapiens
QVFLNNYDA

SEQ ID NO: 132745 - protein, 9 aa, Homo sapiens
VFLNNYDAE

SEQ ID NO: 132746 - protein, 9 aa, Homo sapiens
FLNNYDAEN

SEQ ID NO: 132747 - protein, 9 aa, Homo sapiens
LNNYDAENK

SEQ ID NO: 132748 - protein, 9 aa, Homo sapiens
NNYDAENKL

SEQ ID NO: 132749 - protein, 9 aa, Homo sapiens
NYDAENKLN

SEQ ID NO: 132750 - protein, 9 aa, Homo sapiens
YDAENKLND

SEQ ID NO: 132751 - protein, 9 aa, Homo sapiens
DAENKLNDI

SEQ ID NO: 132752 - protein, 9 aa, Homo sapiens
AENKLNDIL

SEQ ID NO: 132753 - protein, 9 aa, Homo sapiens
ENKLNDILL

SEQ ID NO: 132754 - protein, 9 aa, Homo sapiens
NKLNDILLI

SEQ ID NO: 132755 - protein, 9 aa, Homo sapiens
KLNDILLIQ

SEQ ID NO: 132756 - protein, 9 aa, Homo sapiens
LNDILLIQL

SEQ ID NO: 132757 - protein, 9 aa, Homo sapiens
NDILLIQLS

SEQ ID NO: 132758 - protein, 9 aa, Homo sapiens
DILLIQLSS

SEQ ID NO: 132759 - protein, 9 aa, Homo sapiens
ILLIQLSSP

SEQ ID NO: 132760 - protein, 9 aa, Homo sapiens
LLIQLSSPA

SEQ ID NO: 132761 - protein, 9 aa, Homo sapiens
LIQLSSPAN

SEQ ID NO: 132762 - protein, 9 aa, Homo sapiens
IQLSSPANL

SEQ ID NO: 132763 - protein, 9 aa, Homo sapiens
QLSSPANLS

SEQ ID NO: 132764 - protein, 9 aa, Homo sapiens
LSSPANLSA

SEQ ID NO: 132765 - protein, 9 aa, Homo sapiens
SSPANLSAS

SEQ ID NO: 132766 - protein, 9 aa, Homo sapiens
SPANLSASV

SEQ ID NO: 132767 - protein, 9 aa, Homo sapiens
PANLSASVA

SEQ ID NO: 132768 - protein, 9 aa, Homo sapiens
ANLSASVAT

SEQ ID NO: 132769 - protein, 9 aa, Homo sapiens
NLSASVATV

SEQ ID NO: 132770 - protein, 9 aa, Homo sapiens
LSASVATVQ

SEQ ID NO: 132771 - protein, 9 aa, Homo sapiens
SASVATVQL

SEQ ID NO: 132772 - protein, 9 aa, Homo sapiens
ASVATVQLP

SEQ ID NO: 132773 - protein, 9 aa, Homo sapiens
SVATVQLPQ

SEQ ID NO: 132774 - protein, 9 aa, Homo sapiens
VATVQLPQQ

SEQ ID NO: 132775 - protein, 9 aa, Homo sapiens
ATVQLPQQD

SEQ ID NO: 132776 - protein, 9 aa, Homo sapiens
TVQLPQQDQ

SEQ ID NO: 132777 - protein, 9 aa, Homo sapiens
VQLPQQDQP

SEQ ID NO: 132778 - protein, 9 aa, Homo sapiens
QLPQQDQPV

SEQ ID NO: 132779 - protein, 9 aa, Homo sapiens
LPQQDQPVP

SEQ ID NO: 132780 - protein, 9 aa, Homo sapiens
PQQDQPVPH

SEQ ID NO: 132781 - protein, 9 aa, Homo sapiens
QQDQPVPHG

SEQ ID NO: 132782 - protein, 9 aa, Homo sapiens
QDQPVPHGT

SEQ ID NO: 132783 - protein, 9 aa, Homo sapiens
DQPVPHGTQ

SEQ ID NO: 132784 - protein, 9 aa, Homo sapiens
QPVPHGTQC

SEQ ID NO: 132785 - protein, 9 aa, Homo sapiens
PVPHGTQCL

SEQ ID NO: 132786 - protein, 9 aa, Homo sapiens
VPHGTQCLA

SEQ ID NO: 132787 - protein, 9 aa, Homo sapiens
PHGTQCLAM

SEQ ID NO: 132788 - protein, 9 aa, Homo sapiens
HGTQCLAMG

SEQ ID NO: 132789 - protein, 9 aa, Homo sapiens
GTQCLAMGW

SEQ ID NO: 132790 - protein, 9 aa, Homo sapiens
TQCLAMGWG

SEQ ID NO: 132791 - protein, 9 aa, Homo sapiens
QCLAMGWGR

SEQ ID NO: 132792 - protein, 9 aa, Homo sapiens
CLAMGWGRV

SEQ ID NO: 132793 - protein, 9 aa, Homo sapiens
LAMGWGRVG

SEQ ID NO: 132794 - protein, 9 aa, Homo sapiens
AMGWGRVGA

SEQ ID NO: 132795 - protein, 9 aa, Homo sapiens
MGWGRVGAH

SEQ ID NO: 132796 - protein, 9 aa, Homo sapiens
GWGRVGAHD

SEQ ID NO: 132797 - protein, 9 aa, Homo sapiens
WGRVGAHDP

SEQ ID NO: 132798 - protein, 9 aa, Homo sapiens
GRVGAHDPP

SEQ ID NO: 132799 - protein, 9 aa, Homo sapiens
RVGAHDPPA

SEQ ID NO: 132800 - protein, 9 aa, Homo sapiens
VGAHDPPAQ

SEQ ID NO: 132801 - protein, 9 aa, Homo sapiens
GAHDPPAQV

SEQ ID NO: 132802 - protein, 9 aa, Homo sapiens
AHDPPAQVL

SEQ ID NO: 132803 - protein, 9 aa, Homo sapiens
HDPPAQVLQ

SEQ ID NO: 132804 - protein, 9 aa, Homo sapiens
DPPAQVLQE

SEQ ID NO: 132805 - protein, 9 aa, Homo sapiens
PPAQVLQEL

SEQ ID NO: 132806 - protein, 9 aa, Homo sapiens
PAQVLQELN

SEQ ID NO: 132807 - protein, 9 aa, Homo sapiens
AQVLQELNV

SEQ ID NO: 132808 - protein, 9 aa, Homo sapiens
QVLQELNVT

SEQ ID NO: 132809 - protein, 9 aa, Homo sapiens
VLQELNVTV

SEQ ID NO: 132810 - protein, 9 aa, Homo sapiens
LQELNVTVV

SEQ ID NO: 132811 - protein, 9 aa, Homo sapiens
QELNVTVVT

SEQ ID NO: 132812 - protein, 9 aa, Homo sapiens
ELNVTVVTF

SEQ ID NO: 132813 - protein, 9 aa, Homo sapiens
LNVTVVTFF

SEQ ID NO: 132814 - protein, 9 aa, Homo sapiens
NVTVVTFFC

SEQ ID NO: 132815 - protein, 9 aa, Homo sapiens
VTVVTFFCR

SEQ ID NO: 132816 - protein, 9 aa, Homo sapiens
TVVTFFCRP

SEQ ID NO: 132817 - protein, 9 aa, Homo sapiens
VVTFFCRPH

SEQ ID NO: 132818 - protein, 9 aa, Homo sapiens
VTFFCRPHN

SEQ ID NO: 132819 - protein, 9 aa, Homo sapiens
TFFCRPHNI

SEQ ID NO: 132820 - protein, 9 aa, Homo sapiens
FFCRPHNIC

SEQ ID NO: 132821 - protein, 9 aa, Homo sapiens
FCRPHNICT

SEQ ID NO: 132822 - protein, 9 aa, Homo sapiens
CRPHNICTF

SEQ ID NO: 132823 - protein, 9 aa, Homo sapiens
RPHNICTFV

SEQ ID NO: 132824 - protein, 9 aa, Homo sapiens
PHNICTFVP

SEQ ID NO: 132825 - protein, 9 aa, Homo sapiens
HNICTFVPR

SEQ ID NO: 132826 - protein, 9 aa, Homo sapiens
NICTFVPRR

SEQ ID NO: 132827 - protein, 9 aa, Homo sapiens
ICTFVPRRK

SEQ ID NO: 132828 - protein, 9 aa, Homo sapiens
CTFVPRRKA

SEQ ID NO: 132829 - protein, 9 aa, Homo sapiens
TFVPRRKAG

SEQ ID NO: 132830 - protein, 9 aa, Homo sapiens
FVPRRKAGI

SEQ ID NO: 132831 - protein, 9 aa, Homo sapiens
VPRRKAGIC

SEQ ID NO: 132832 - protein, 9 aa, Homo sapiens
PRRKAGICF

SEQ ID NO: 132833 - protein, 9 aa, Homo sapiens
RRKAGICFG

SEQ ID NO: 132834 - protein, 9 aa, Homo sapiens
RKAGICFGD

SEQ ID NO: 132835 - protein, 9 aa, Homo sapiens
KAGICFGDS

SEQ ID NO: 132836 - protein, 9 aa, Homo sapiens
AGICFGDSG

SEQ ID NO: 132837 - protein, 9 aa, Homo sapiens
GICFGDSGG

SEQ ID NO: 132838 - protein, 9 aa, Homo sapiens
ICFGDSGGP

SEQ ID NO: 132839 - protein, 9 aa, Homo sapiens
CFGDSGGPL

SEQ ID NO: 132840 - protein, 9 aa, Homo sapiens
FGDSGGPLI

SEQ ID NO: 132841 - protein, 9 aa, Homo sapiens
GDSGGPLIC

SEQ ID NO: 132842 - protein, 9 aa, Homo sapiens
DSGGPLICD

SEQ ID NO: 132843 - protein, 9 aa, Homo sapiens
SGGPLICDG

SEQ ID NO: 132844 - protein, 9 aa, Homo sapiens
GGPLICDGI

SEQ ID NO: 132845 - protein, 9 aa, Homo sapiens
GPLICDGII

SEQ ID NO: 132846 - protein, 9 aa, Homo sapiens
PLICDGIIQ

SEQ ID NO: 132847 - protein, 9 aa, Homo sapiens
LICDGIIQG

SEQ ID NO: 132848 - protein, 9 aa, Homo sapiens
ICDGIIQGI

SEQ ID NO: 132849 - protein, 9 aa, Homo sapiens
CDGIIQGID

SEQ ID NO: 132850 - protein, 9 aa, Homo sapiens
DGIIQGIDS

SEQ ID NO: 132851 - protein, 9 aa, Homo sapiens
GIIQGIDSF

SEQ ID NO: 132852 - protein, 9 aa, Homo sapiens
IIQGIDSFV

SEQ ID NO: 132853 - protein, 9 aa, Homo sapiens
IQGIDSFVI

SEQ ID NO: 132854 - protein, 9 aa, Homo sapiens
QGIDSFVIW

SEQ ID NO: 132855 - protein, 9 aa, Homo sapiens
GIDSFVIWG

SEQ ID NO: 132856 - protein, 9 aa, Homo sapiens
IDSFVIWGC

SEQ ID NO: 132857 - protein, 9 aa, Homo sapiens
DSFVIWGCA

SEQ ID NO: 132858 - protein, 9 aa, Homo sapiens
SFVIWGCAT

SEQ ID NO: 132859 - protein, 9 aa, Homo sapiens
FVIWGCATR

SEQ ID NO: 132860 - protein, 9 aa, Homo sapiens
VIWGCATRL

SEQ ID NO: 132861 - protein, 9 aa, Homo sapiens
IWGCATRLF

SEQ ID NO: 132862 - protein, 9 aa, Homo sapiens
WGCATRLFP

SEQ ID NO: 132863 - protein, 9 aa, Homo sapiens
GCATRLFPD

SEQ ID NO: 132864 - protein, 9 aa, Homo sapiens
CATRLFPDF

SEQ ID NO: 132865 - protein, 9 aa, Homo sapiens
ATRLFPDFF

SEQ ID NO: 132866 - protein, 9 aa, Homo sapiens
TRLFPDFFT

SEQ ID NO: 132867 - protein, 9 aa, Homo sapiens
RLFPDFFTR

SEQ ID NO: 132868 - protein, 9 aa, Homo sapiens
LFPDFFTRV

SEQ ID NO: 132869 - protein, 9 aa, Homo sapiens
FPDFFTRVA

SEQ ID NO: 132870 - protein, 9 aa, Homo sapiens
PDFFTRVAL

SEQ ID NO: 132871 - protein, 9 aa, Homo sapiens
DFFTRVALY

SEQ ID NO: 132872 - protein, 9 aa, Homo sapiens
FFTRVALYV

SEQ ID NO: 132873 - protein, 9 aa, Homo sapiens
FTRVALYVD

SEQ ID NO: 132874 - protein, 9 aa, Homo sapiens
TRVALYVDW

SEQ ID NO: 132875 - protein, 9 aa, Homo sapiens
RVALYVDWI

SEQ ID NO: 132876 - protein, 9 aa, Homo sapiens
VALYVDWIR

SEQ ID NO: 132877 - protein, 9 aa, Homo sapiens
ALYVDWIRS

SEQ ID NO: 132878 - protein, 9 aa, Homo sapiens
LYVDWIRST

SEQ ID NO: 132879 - protein, 9 aa, Homo sapiens
YVDWIRSTL

SEQ ID NO: 132880 - protein, 9 aa, Homo sapiens
VDWIRSTLR

SEQ ID NO: 132881 - protein, 9 aa, Homo sapiens
DWIRSTLRR

SEQ ID NO: 132882 - protein, 9 aa, Homo sapiens
WIRSTLRRV

SEQ ID NO: 132883 - protein, 9 aa, Homo sapiens
IRSTLRRVE

SEQ ID NO: 132884 - protein, 9 aa, Homo sapiens
RSTLRRVEA

SEQ ID NO: 132885 - protein, 9 aa, Homo sapiens
STLRRVEAK

SEQ ID NO: 132886 - protein, 9 aa, Homo sapiens
TLRRVEAKG

SEQ ID NO: 132887 - protein, 9 aa, Homo sapiens
LRRVEAKGR

SEQ ID NO: 132888 - protein, 9 aa, Homo sapiens
RRVEAKGRP

SEQ ID NO: 132889 - protein, 9 aa, Homo sapiens
MWVPVVFLT

SEQ ID NO: 132890 - protein, 9 aa, Homo sapiens
WVPVVFLTL

SEQ ID NO: 132891 - protein, 9 aa, Homo sapiens
VPVVFLTLS

SEQ ID NO: 132892 - protein, 9 aa, Homo sapiens
PVVFLTLSV

SEQ ID NO: 132893 - protein, 9 aa, Homo sapiens
VVFLTLSVT

SEQ ID NO: 132894 - protein, 9 aa, Homo sapiens
VFLTLSVTW

SEQ ID NO: 132895 - protein, 9 aa, Homo sapiens
FLTLSVTWI

SEQ ID NO: 132896 - protein, 9 aa, Homo sapiens
LTLSVTWIG

SEQ ID NO: 132897 - protein, 9 aa, Homo sapiens
TLSVTWIGA

SEQ ID NO: 132898 - protein, 9 aa, Homo sapiens
LSVTWIGAA

SEQ ID NO: 132899 - protein, 9 aa, Homo sapiens
SVTWIGAAP

SEQ ID NO: 132900 - protein, 9 aa, Homo sapiens
VTWIGAAPL

SEQ ID NO: 132901 - protein, 9 aa, Homo sapiens
TWIGAAPLI

SEQ ID NO: 132902 - protein, 9 aa, Homo sapiens
WIGAAPLIL

SEQ ID NO: 132903 - protein, 9 aa, Homo sapiens
IGAAPLILS

SEQ ID NO: 132904 - protein, 9 aa, Homo sapiens
GAAPLILSR

SEQ ID NO: 132905 - protein, 9 aa, Homo sapiens
AAPLILSRI

SEQ ID NO: 132906 - protein, 9 aa, Homo sapiens
APLILSRIV

SEQ ID NO: 132907 - protein, 9 aa, Homo sapiens
PLILSRIVG

SEQ ID NO: 132908 - protein, 9 aa, Homo sapiens
LILSRIVGG

SEQ ID NO: 132909 - protein, 9 aa, Homo sapiens
ILSRIVGGW

SEQ ID NO: 132910 - protein, 9 aa, Homo sapiens
LSRIVGGWE

SEQ ID NO: 132911 - protein, 9 aa, Homo sapiens
SRIVGGWEC

SEQ ID NO: 132912 - protein, 9 aa, Homo sapiens
RIVGGWECE

SEQ ID NO: 132913 - protein, 9 aa, Homo sapiens
IVGGWECEK

SEQ ID NO: 132914 - protein, 9 aa, Homo sapiens
VGGWECEKH

SEQ ID NO: 132915 - protein, 9 aa, Homo sapiens
GGWECEKHS

SEQ ID NO: 132916 - protein, 9 aa, Homo sapiens
GWECEKHSQ

SEQ ID NO: 132917 - protein, 9 aa, Homo sapiens
WECEKHSQP

SEQ ID NO: 132918 - protein, 9 aa, Homo sapiens
ECEKHSQPW

SEQ ID NO: 132919 - protein, 9 aa, Homo sapiens
CEKHSQPWQ

SEQ ID NO: 132920 - protein, 9 aa, Homo sapiens
EKHSQPWQV

SEQ ID NO: 132921 - protein, 9 aa, Homo sapiens
KHSQPWQVL

SEQ ID NO: 132922 - protein, 9 aa, Homo sapiens
HSQPWQVLV

SEQ ID NO: 132923 - protein, 9 aa, Homo sapiens
SQPWQVLVA

SEQ ID NO: 132924 - protein, 9 aa, Homo sapiens
QPWQVLVAS

SEQ ID NO: 132925 - protein, 9 aa, Homo sapiens
PWQVLVASR

SEQ ID NO: 132926 - protein, 9 aa, Homo sapiens
WQVLVASRG

SEQ ID NO: 132927 - protein, 9 aa, Homo sapiens
QVLVASRGR

SEQ ID NO: 132928 - protein, 9 aa, Homo sapiens
VLVASRGRA

SEQ ID NO: 132929 - protein, 9 aa, Homo sapiens
LVASRGRAV

SEQ ID NO: 132930 - protein, 9 aa, Homo sapiens
VASRGRAVC

SEQ ID NO: 132931 - protein, 9 aa, Homo sapiens
ASRGRAVCG

SEQ ID NO: 132932 - protein, 9 aa, Homo sapiens
SRGRAVCGG

SEQ ID NO: 132933 - protein, 9 aa, Homo sapiens
RGRAVCGGV

SEQ ID NO: 132934 - protein, 9 aa, Homo sapiens
GRAVCGGVL

SEQ ID NO: 132935 - protein, 9 aa, Homo sapiens
RAVCGGVLV

SEQ ID NO: 132936 - protein, 9 aa, Homo sapiens
AVCGGVLVH

SEQ ID NO: 132937 - protein, 9 aa, Homo sapiens
VCGGVLVHP

SEQ ID NO: 132938 - protein, 9 aa, Homo sapiens
CGGVLVHPQ

SEQ ID NO: 132939 - protein, 9 aa, Homo sapiens
GGVLVHPQW

SEQ ID NO: 132940 - protein, 9 aa, Homo sapiens
GVLVHPQWV

SEQ ID NO: 132941 - protein, 9 aa, Homo sapiens
VLVHPQWVL

SEQ ID NO: 132942 - protein, 9 aa, Homo sapiens
LVHPQWVLT

SEQ ID NO: 132943 - protein, 9 aa, Homo sapiens
VHPQWVLTA

SEQ ID NO: 132944 - protein, 9 aa, Homo sapiens
HPQWVLTAA

SEQ ID NO: 132945 - protein, 9 aa, Homo sapiens
PQWVLTAAH

SEQ ID NO: 132946 - protein, 9 aa, Homo sapiens
QWVLTAAHC

SEQ ID NO: 132947 - protein, 9 aa, Homo sapiens
WVLTAAHCI

SEQ ID NO: 132948 - protein, 9 aa, Homo sapiens
VLTAAHCIR

SEQ ID NO: 132949 - protein, 9 aa, Homo sapiens
LTAAHCIRN

SEQ ID NO: 132950 - protein, 9 aa, Homo sapiens
TAAHCIRNK

SEQ ID NO: 132951 - protein, 9 aa, Homo sapiens
AAHCIRNKS

SEQ ID NO: 132952 - protein, 9 aa, Homo sapiens
AHCIRNKSV

SEQ ID NO: 132953 - protein, 9 aa, Homo sapiens
HCIRNKSVI

SEQ ID NO: 132954 - protein, 9 aa, Homo sapiens
CIRNKSVIL

SEQ ID NO: 132955 - protein, 9 aa, Homo sapiens
IRNKSVILL

SEQ ID NO: 132956 - protein, 9 aa, Homo sapiens
RNKSVILLG

SEQ ID NO: 132957 - protein, 9 aa, Homo sapiens
NKSVILLGR

SEQ ID NO: 132958 - protein, 9 aa, Homo sapiens
KSVILLGRH

SEQ ID NO: 132959 - protein, 9 aa, Homo sapiens
SVILLGRHS

SEQ ID NO: 132960 - protein, 9 aa, Homo sapiens
VILLGRHSL

SEQ ID NO: 132961 - protein, 9 aa, Homo sapiens
ILLGRHSLF

SEQ ID NO: 132962 - protein, 9 aa, Homo sapiens
LLGRHSLFH

SEQ ID NO: 132963 - protein, 9 aa, Homo sapiens
LGRHSLFHP

SEQ ID NO: 132964 - protein, 9 aa, Homo sapiens
GRHSLFHPE

SEQ ID NO: 132965 - protein, 9 aa, Homo sapiens
RHSLFHPED

SEQ ID NO: 132966 - protein, 9 aa, Homo sapiens
HSLFHPEDT

SEQ ID NO: 132967 - protein, 9 aa, Homo sapiens
SLFHPEDTG

SEQ ID NO: 132968 - protein, 9 aa, Homo sapiens
LFHPEDTGQ

SEQ ID NO: 132969 - protein, 9 aa, Homo sapiens
FHPEDTGQV

SEQ ID NO: 132970 - protein, 9 aa, Homo sapiens
HPEDTGQVF

SEQ ID NO: 132971 - protein, 9 aa, Homo sapiens
PEDTGQVFQ

SEQ ID NO: 132972 - protein, 9 aa, Homo sapiens
EDTGQVFQV

SEQ ID NO: 132973 - protein, 9 aa, Homo sapiens
DTGQVFQVS

SEQ ID NO: 132974 - protein, 9 aa, Homo sapiens
TGQVFQVSH

SEQ ID NO: 132975 - protein, 9 aa, Homo sapiens
GQVFQVSHS

SEQ ID NO: 132976 - protein, 9 aa, Homo sapiens
QVFQVSHSF

SEQ ID NO: 132977 - protein, 9 aa, Homo sapiens
VFQVSHSFP

SEQ ID NO: 132978 - protein, 9 aa, Homo sapiens
FQVSHSFPH

SEQ ID NO: 132979 - protein, 9 aa, Homo sapiens
QVSHSFPHP

SEQ ID NO: 132980 - protein, 9 aa, Homo sapiens
VSHSFPHPL

SEQ ID NO: 132981 - protein, 9 aa, Homo sapiens
SHSFPHPLY

SEQ ID NO: 132982 - protein, 9 aa, Homo sapiens
HSFPHPLYD

SEQ ID NO: 132983 - protein, 9 aa, Homo sapiens
SFPHPLYDM

SEQ ID NO: 132984 - protein, 9 aa, Homo sapiens
FPHPLYDMS

SEQ ID NO: 132985 - protein, 9 aa, Homo sapiens
PHPLYDMSL

SEQ ID NO: 132986 - protein, 9 aa, Homo sapiens
HPLYDMSLL

SEQ ID NO: 132987 - protein, 9 aa, Homo sapiens
PLYDMSLLK

SEQ ID NO: 132988 - protein, 9 aa, Homo sapiens
LYDMSLLKN

SEQ ID NO: 132989 - protein, 9 aa, Homo sapiens
YDMSLLKNR

SEQ ID NO: 132990 - protein, 9 aa, Homo sapiens
DMSLLKNRF

SEQ ID NO: 132991 - protein, 9 aa, Homo sapiens
MSLLKNRFL

SEQ ID NO: 132992 - protein, 9 aa, Homo sapiens
SLLKNRFLR

SEQ ID NO: 132993 - protein, 9 aa, Homo sapiens
LLKNRFLRP

SEQ ID NO: 132994 - protein, 9 aa, Homo sapiens
LKNRFLRPG

SEQ ID NO: 132995 - protein, 9 aa, Homo sapiens
KNRFLRPGD

SEQ ID NO: 132996 - protein, 9 aa, Homo sapiens
NRFLRPGDD

SEQ ID NO: 132997 - protein, 9 aa, Homo sapiens
RFLRPGDDS

SEQ ID NO: 132998 - protein, 9 aa, Homo sapiens
FLRPGDDSS

SEQ ID NO: 132999 - protein, 9 aa, Homo sapiens
LRPGDDSSH

SEQ ID NO: 133000 - protein, 9 aa, Homo sapiens
RPGDDSSHD

SEQ ID NO: 133001 - protein, 9 aa, Homo sapiens
PGDDSSHDL

SEQ ID NO: 133002 - protein, 9 aa, Homo sapiens
GDDSSHDLM

SEQ ID NO: 133003 - protein, 9 aa, Homo sapiens
DDSSHDLML

SEQ ID NO: 133004 - protein, 9 aa, Homo sapiens
DSSHDLMLL

SEQ ID NO: 133005 - protein, 9 aa, Homo sapiens
SSHDLMLLR

SEQ ID NO: 133006 - protein, 9 aa, Homo sapiens
SHDLMLLRL

SEQ ID NO: 133007 - protein, 9 aa, Homo sapiens
HDLMLLRLS

SEQ ID NO: 133008 - protein, 9 aa, Homo sapiens
DLMLLRLSE

SEQ ID NO: 133009 - protein, 9 aa, Homo sapiens
LMLLRLSEP

SEQ ID NO: 133010 - protein, 9 aa, Homo sapiens
MLLRLSEPA

SEQ ID NO: 133011 - protein, 9 aa, Homo sapiens
LLRLSEPAE

SEQ ID NO: 133012 - protein, 9 aa, Homo sapiens
LRLSEPAEL

SEQ ID NO: 133013 - protein, 9 aa, Homo sapiens
RLSEPAELT

SEQ ID NO: 133014 - protein, 9 aa, Homo sapiens
LSEPAELTD

SEQ ID NO: 133015 - protein, 9 aa, Homo sapiens
SEPAELTDA

SEQ ID NO: 133016 - protein, 9 aa, Homo sapiens
EPAELTDAV

SEQ ID NO: 133017 - protein, 9 aa, Homo sapiens
PAELTDAVK

SEQ ID NO: 133018 - protein, 9 aa, Homo sapiens
AELTDAVKV

SEQ ID NO: 133019 - protein, 9 aa, Homo sapiens
ELTDAVKVM

SEQ ID NO: 133020 - protein, 9 aa, Homo sapiens
LTDAVKVMD

SEQ ID NO: 133021 - protein, 9 aa, Homo sapiens
TDAVKVMDL

SEQ ID NO: 133022 - protein, 9 aa, Homo sapiens
DAVKVMDLP

SEQ ID NO: 133023 - protein, 9 aa, Homo sapiens
AVKVMDLPT

SEQ ID NO: 133024 - protein, 9 aa, Homo sapiens
VKVMDLPTQ

SEQ ID NO: 133025 - protein, 9 aa, Homo sapiens
KVMDLPTQE

SEQ ID NO: 133026 - protein, 9 aa, Homo sapiens
VMDLPTQEP

SEQ ID NO: 133027 - protein, 9 aa, Homo sapiens
MDLPTQEPA

SEQ ID NO: 133028 - protein, 9 aa, Homo sapiens
DLPTQEPAL

SEQ ID NO: 133029 - protein, 9 aa, Homo sapiens
LPTQEPALG

SEQ ID NO: 133030 - protein, 9 aa, Homo sapiens
PTQEPALGT

SEQ ID NO: 133031 - protein, 9 aa, Homo sapiens
TQEPALGTT

SEQ ID NO: 133032 - protein, 9 aa, Homo sapiens
QEPALGTTC

SEQ ID NO: 133033 - protein, 9 aa, Homo sapiens
EPALGTTCY

SEQ ID NO: 133034 - protein, 9 aa, Homo sapiens
PALGTTCYA

SEQ ID NO: 133035 - protein, 9 aa, Homo sapiens
ALGTTCYAS

SEQ ID NO: 133036 - protein, 9 aa, Homo sapiens
LGTTCYASG

SEQ ID NO: 133037 - protein, 9 aa, Homo sapiens
GTTCYASGW

SEQ ID NO: 133038 - protein, 9 aa, Homo sapiens
TTCYASGWG

SEQ ID NO: 133039 - protein, 9 aa, Homo sapiens
TCYASGWGS

SEQ ID NO: 133040 - protein, 9 aa, Homo sapiens
CYASGWGSI

SEQ ID NO: 133041 - protein, 9 aa, Homo sapiens
YASGWGSIE

SEQ ID NO: 133042 - protein, 9 aa, Homo sapiens
ASGWGSIEP

SEQ ID NO: 133043 - protein, 9 aa, Homo sapiens
SGWGSIEPE

SEQ ID NO: 133044 - protein, 9 aa, Homo sapiens
GWGSIEPEE

SEQ ID NO: 133045 - protein, 9 aa, Homo sapiens
WGSIEPEEF

SEQ ID NO: 133046 - protein, 9 aa, Homo sapiens
GSIEPEEFL

SEQ ID NO: 133047 - protein, 9 aa, Homo sapiens
SIEPEEFLT

SEQ ID NO: 133048 - protein, 9 aa, Homo sapiens
IEPEEFLTP

SEQ ID NO: 133049 - protein, 9 aa, Homo sapiens
EPEEFLTPK

SEQ ID NO: 133050 - protein, 9 aa, Homo sapiens
PEEFLTPKK

SEQ ID NO: 133051 - protein, 9 aa, Homo sapiens
EEFLTPKKL

SEQ ID NO: 133052 - protein, 9 aa, Homo sapiens
EFLTPKKLQ

SEQ ID NO: 133053 - protein, 9 aa, Homo sapiens
FLTPKKLQC

SEQ ID NO: 133054 - protein, 9 aa, Homo sapiens
LTPKKLQCV

SEQ ID NO: 133055 - protein, 9 aa, Homo sapiens
TPKKLQCVD

SEQ ID NO: 133056 - protein, 9 aa, Homo sapiens
PKKLQCVDL

SEQ ID NO: 133057 - protein, 9 aa, Homo sapiens
KKLQCVDLH

SEQ ID NO: 133058 - protein, 9 aa, Homo sapiens
KLQCVDLHV

SEQ ID NO: 133059 - protein, 9 aa, Homo sapiens
LQCVDLHVI

SEQ ID NO: 133060 - protein, 9 aa, Homo sapiens
QCVDLHVIS

SEQ ID NO: 133061 - protein, 9 aa, Homo sapiens
CVDLHVISN

SEQ ID NO: 133062 - protein, 9 aa, Homo sapiens
VDLHVISND

SEQ ID NO: 133063 - protein, 9 aa, Homo sapiens
DLHVISNDV

SEQ ID NO: 133064 - protein, 9 aa, Homo sapiens
LHVISNDVC

SEQ ID NO: 133065 - protein, 9 aa, Homo sapiens
HVISNDVCA

SEQ ID NO: 133066 - protein, 9 aa, Homo sapiens
VISNDVCAQ

SEQ ID NO: 133067 - protein, 9 aa, Homo sapiens
ISNDVCAQV

SEQ ID NO: 133068 - protein, 9 aa, Homo sapiens
SNDVCAQVH

SEQ ID NO: 133069 - protein, 9 aa, Homo sapiens
NDVCAQVHP

SEQ ID NO: 133070 - protein, 9 aa, Homo sapiens
DVCAQVHPQ

SEQ ID NO: 133071 - protein, 9 aa, Homo sapiens
VCAQVHPQK

SEQ ID NO: 133072 - protein, 9 aa, Homo sapiens
CAQVHPQKV

SEQ ID NO: 133073 - protein, 9 aa, Homo sapiens
AQVHPQKVT

SEQ ID NO: 133074 - protein, 9 aa, Homo sapiens
QVHPQKVTK

SEQ ID NO: 133075 - protein, 9 aa, Homo sapiens
VHPQKVTKF

SEQ ID NO: 133076 - protein, 9 aa, Homo sapiens
HPQKVTKFM

SEQ ID NO: 133077 - protein, 9 aa, Homo sapiens
PQKVTKFML

SEQ ID NO: 133078 - protein, 9 aa, Homo sapiens
QKVTKFMLC

SEQ ID NO: 133079 - protein, 9 aa, Homo sapiens
KVTKFMLCA

SEQ ID NO: 133080 - protein, 9 aa, Homo sapiens
VTKFMLCAG

SEQ ID NO: 133081 - protein, 9 aa, Homo sapiens
TKFMLCAGR

SEQ ID NO: 133082 - protein, 9 aa, Homo sapiens
KFMLCAGRW

SEQ ID NO: 133083 - protein, 9 aa, Homo sapiens
FMLCAGRWT

SEQ ID NO: 133084 - protein, 9 aa, Homo sapiens
MLCAGRWTG

SEQ ID NO: 133085 - protein, 9 aa, Homo sapiens
LCAGRWTGG

SEQ ID NO: 133086 - protein, 9 aa, Homo sapiens
CAGRWTGGK

SEQ ID NO: 133087 - protein, 9 aa, Homo sapiens
AGRWTGGKS

SEQ ID NO: 133088 - protein, 9 aa, Homo sapiens
GRWTGGKST

SEQ ID NO: 133089 - protein, 9 aa, Homo sapiens
RWTGGKSTC

SEQ ID NO: 133090 - protein, 9 aa, Homo sapiens
WTGGKSTCS

SEQ ID NO: 133091 - protein, 9 aa, Homo sapiens
TGGKSTCSG

SEQ ID NO: 133092 - protein, 9 aa, Homo sapiens
GGKSTCSGD

SEQ ID NO: 133093 - protein, 9 aa, Homo sapiens
GKSTCSGDS

SEQ ID NO: 133094 - protein, 9 aa, Homo sapiens
KSTCSGDSG

SEQ ID NO: 133095 - protein, 9 aa, Homo sapiens
STCSGDSGG

SEQ ID NO: 133096 - protein, 9 aa, Homo sapiens
TCSGDSGGP

SEQ ID NO: 133097 - protein, 9 aa, Homo sapiens
CSGDSGGPL

SEQ ID NO: 133098 - protein, 9 aa, Homo sapiens
SGDSGGPLV

SEQ ID NO: 133099 - protein, 9 aa, Homo sapiens
GDSGGPLVC

SEQ ID NO: 133100 - protein, 9 aa, Homo sapiens
DSGGPLVCN

SEQ ID NO: 133101 - protein, 9 aa, Homo sapiens
SGGPLVCNG

SEQ ID NO: 133102 - protein, 9 aa, Homo sapiens
GGPLVCNGV

SEQ ID NO: 133103 - protein, 9 aa, Homo sapiens
GPLVCNGVL

SEQ ID NO: 133104 - protein, 9 aa, Homo sapiens
PLVCNGVLQ

SEQ ID NO: 133105 - protein, 9 aa, Homo sapiens
LVCNGVLQG

SEQ ID NO: 133106 - protein, 9 aa, Homo sapiens
VCNGVLQGI

SEQ ID NO: 133107 - protein, 9 aa, Homo sapiens
CNGVLQGIT

SEQ ID NO: 133108 - protein, 9 aa, Homo sapiens
NGVLQGITS

SEQ ID NO: 133109 - protein, 9 aa, Homo sapiens
GVLQGITSW

SEQ ID NO: 133110 - protein, 9 aa, Homo sapiens
VLQGITSWG

SEQ ID NO: 133111 - protein, 9 aa, Homo sapiens
LQGITSWGS

SEQ ID NO: 133112 - protein, 9 aa, Homo sapiens
QGITSWGSE

SEQ ID NO: 133113 - protein, 9 aa, Homo sapiens
GITSWGSEP

SEQ ID NO: 133114 - protein, 9 aa, Homo sapiens
ITSWGSEPC

SEQ ID NO: 133115 - protein, 9 aa, Homo sapiens
TSWGSEPCA

SEQ ID NO: 133116 - protein, 9 aa, Homo sapiens
SWGSEPCAL

SEQ ID NO: 133117 - protein, 9 aa, Homo sapiens
WGSEPCALP

SEQ ID NO: 133118 - protein, 9 aa, Homo sapiens
GSEPCALPE

SEQ ID NO: 133119 - protein, 9 aa, Homo sapiens
SEPCALPER

SEQ ID NO: 133120 - protein, 9 aa, Homo sapiens
EPCALPERP

SEQ ID NO: 133121 - protein, 9 aa, Homo sapiens
PCALPERPS

SEQ ID NO: 133122 - protein, 9 aa, Homo sapiens
CALPERPSL

SEQ ID NO: 133123 - protein, 9 aa, Homo sapiens
ALPERPSLY

SEQ ID NO: 133124 - protein, 9 aa, Homo sapiens
LPERPSLYT

SEQ ID NO: 133125 - protein, 9 aa, Homo sapiens
PERPSLYTK

SEQ ID NO: 133126 - protein, 9 aa, Homo sapiens
ERPSLYTKV

SEQ ID NO: 133127 - protein, 9 aa, Homo sapiens
RPSLYTKVV

SEQ ID NO: 133128 - protein, 9 aa, Homo sapiens
PSLYTKVVH

SEQ ID NO: 133129 - protein, 9 aa, Homo sapiens
SLYTKVVHY

SEQ ID NO: 133130 - protein, 9 aa, Homo sapiens
LYTKVVHYR

SEQ ID NO: 133131 - protein, 9 aa, Homo sapiens
YTKVVHYRK

SEQ ID NO: 133132 - protein, 9 aa, Homo sapiens
TKVVHYRKW

SEQ ID NO: 133133 - protein, 9 aa, Homo sapiens
KVVHYRKWI

SEQ ID NO: 133134 - protein, 9 aa, Homo sapiens
VVHYRKWIK

SEQ ID NO: 133135 - protein, 9 aa, Homo sapiens
VHYRKWIKD

SEQ ID NO: 133136 - protein, 9 aa, Homo sapiens
HYRKWIKDT

SEQ ID NO: 133137 - protein, 9 aa, Homo sapiens
YRKWIKDTI

SEQ ID NO: 133138 - protein, 9 aa, Homo sapiens
RKWIKDTIV

SEQ ID NO: 133139 - protein, 9 aa, Homo sapiens
KWIKDTIVA

SEQ ID NO: 133140 - protein, 9 aa, Homo sapiens
WIKDTIVAN

SEQ ID NO: 133141 - protein, 9 aa, Homo sapiens
IKDTIVANP

SEQ ID NO: 133142 - protein, 9 aa, Homo sapiens
MWVPVVFLT

SEQ ID NO: 133143 - protein, 9 aa, Homo sapiens
WVPVVFLTL

SEQ ID NO: 133144 - protein, 9 aa, Homo sapiens
VPVVFLTLS

SEQ ID NO: 133145 - protein, 9 aa, Homo sapiens
PVVFLTLSV

SEQ ID NO: 133146 - protein, 9 aa, Homo sapiens
VVFLTLSVT

SEQ ID NO: 133147 - protein, 9 aa, Homo sapiens
VFLTLSVTW

SEQ ID NO: 133148 - protein, 9 aa, Homo sapiens
FLTLSVTWI

SEQ ID NO: 133149 - protein, 9 aa, Homo sapiens
LTLSVTWIG

SEQ ID NO: 133150 - protein, 9 aa, Homo sapiens
TLSVTWIGA

SEQ ID NO: 133151 - protein, 9 aa, Homo sapiens
LSVTWIGAA

SEQ ID NO: 133152 - protein, 9 aa, Homo sapiens
SVTWIGAAP

SEQ ID NO: 133153 - protein, 9 aa, Homo sapiens
VTWIGAAPL

SEQ ID NO: 133154 - protein, 9 aa, Homo sapiens
TWIGAAPLI

SEQ ID NO: 133155 - protein, 9 aa, Homo sapiens
WIGAAPLIL

SEQ ID NO: 133156 - protein, 9 aa, Homo sapiens
IGAAPLILS

SEQ ID NO: 133157 - protein, 9 aa, Homo sapiens
GAAPLILSR

SEQ ID NO: 133158 - protein, 9 aa, Homo sapiens
AAPLILSRI

SEQ ID NO: 133159 - protein, 9 aa, Homo sapiens
APLILSRIV

SEQ ID NO: 133160 - protein, 9 aa, Homo sapiens
PLILSRIVG

SEQ ID NO: 133161 - protein, 9 aa, Homo sapiens
LILSRIVGG

SEQ ID NO: 133162 - protein, 9 aa, Homo sapiens
ILSRIVGGW

SEQ ID NO: 133163 - protein, 9 aa, Homo sapiens
LSRIVGGWE

SEQ ID NO: 133164 - protein, 9 aa, Homo sapiens
SRIVGGWEC

SEQ ID NO: 133165 - protein, 9 aa, Homo sapiens
RIVGGWECE

SEQ ID NO: 133166 - protein, 9 aa, Homo sapiens
IVGGWECEK

SEQ ID NO: 133167 - protein, 9 aa, Homo sapiens
VGGWECEKH

SEQ ID NO: 133168 - protein, 9 aa, Homo sapiens
GGWECEKHS

SEQ ID NO: 133169 - protein, 9 aa, Homo sapiens
GWECEKHSQ

SEQ ID NO: 133170 - protein, 9 aa, Homo sapiens
WECEKHSQP

SEQ ID NO: 133171 - protein, 9 aa, Homo sapiens
ECEKHSQPW

SEQ ID NO: 133172 - protein, 9 aa, Homo sapiens
CEKHSQPWQ

SEQ ID NO: 133173 - protein, 9 aa, Homo sapiens
EKHSQPWQV

SEQ ID NO: 133174 - protein, 9 aa, Homo sapiens
KHSQPWQVL

SEQ ID NO: 133175 - protein, 9 aa, Homo sapiens
HSQPWQVLV

SEQ ID NO: 133176 - protein, 9 aa, Homo sapiens
SQPWQVLVA

SEQ ID NO: 133177 - protein, 9 aa, Homo sapiens
QPWQVLVAS

SEQ ID NO: 133178 - protein, 9 aa, Homo sapiens
PWQVLVASR

SEQ ID NO: 133179 - protein, 9 aa, Homo sapiens
WQVLVASRG

SEQ ID NO: 133180 - protein, 9 aa, Homo sapiens
QVLVASRGR

SEQ ID NO: 133181 - protein, 9 aa, Homo sapiens
VLVASRGRA

SEQ ID NO: 133182 - protein, 9 aa, Homo sapiens
LVASRGRAV

SEQ ID NO: 133183 - protein, 9 aa, Homo sapiens
VASRGRAVC

SEQ ID NO: 133184 - protein, 9 aa, Homo sapiens
ASRGRAVCG

SEQ ID NO: 133185 - protein, 9 aa, Homo sapiens
SRGRAVCGG

SEQ ID NO: 133186 - protein, 9 aa, Homo sapiens
RGRAVCGGV

SEQ ID NO: 133187 - protein, 9 aa, Homo sapiens
GRAVCGGVL

SEQ ID NO: 133188 - protein, 9 aa, Homo sapiens
RAVCGGVLV

SEQ ID NO: 133189 - protein, 9 aa, Homo sapiens
AVCGGVLVH

SEQ ID NO: 133190 - protein, 9 aa, Homo sapiens
VCGGVLVHP

SEQ ID NO: 133191 - protein, 9 aa, Homo sapiens
CGGVLVHPQ

SEQ ID NO: 133192 - protein, 9 aa, Homo sapiens
GGVLVHPQW

SEQ ID NO: 133193 - protein, 9 aa, Homo sapiens
GVLVHPQWV

SEQ ID NO: 133194 - protein, 9 aa, Homo sapiens
VLVHPQWVL

SEQ ID NO: 133195 - protein, 9 aa, Homo sapiens
LVHPQWVLT

SEQ ID NO: 133196 - protein, 9 aa, Homo sapiens
VHPQWVLTA

SEQ ID NO: 133197 - protein, 9 aa, Homo sapiens
HPQWVLTAA

SEQ ID NO: 133198 - protein, 9 aa, Homo sapiens
PQWVLTAAH

SEQ ID NO: 133199 - protein, 9 aa, Homo sapiens
QWVLTAAHC

SEQ ID NO: 133200 - protein, 9 aa, Homo sapiens
WVLTAAHCI

SEQ ID NO: 133201 - protein, 9 aa, Homo sapiens
VLTAAHCIR

SEQ ID NO: 133202 - protein, 9 aa, Homo sapiens
LTAAHCIRN

SEQ ID NO: 133203 - protein, 9 aa, Homo sapiens
TAAHCIRNK

SEQ ID NO: 133204 - protein, 9 aa, Homo sapiens
AAHCIRNKS

SEQ ID NO: 133205 - protein, 9 aa, Homo sapiens
AHCIRNKSV

SEQ ID NO: 133206 - protein, 9 aa, Homo sapiens
HCIRNKSVI

SEQ ID NO: 133207 - protein, 9 aa, Homo sapiens
CIRNKSVIL

SEQ ID NO: 133208 - protein, 9 aa, Homo sapiens
IRNKSVILL

SEQ ID NO: 133209 - protein, 9 aa, Homo sapiens
RNKSVILLG

SEQ ID NO: 133210 - protein, 9 aa, Homo sapiens
NKSVILLGR

SEQ ID NO: 133211 - protein, 9 aa, Homo sapiens
KSVILLGRH

SEQ ID NO: 133212 - protein, 9 aa, Homo sapiens
SVILLGRHS

SEQ ID NO: 133213 - protein, 9 aa, Homo sapiens
VILLGRHSL

SEQ ID NO: 133214 - protein, 9 aa, Homo sapiens
ILLGRHSLF

SEQ ID NO: 133215 - protein, 9 aa, Homo sapiens
LLGRHSLFH

SEQ ID NO: 133216 - protein, 9 aa, Homo sapiens
LGRHSLFHP

SEQ ID NO: 133217 - protein, 9 aa, Homo sapiens
GRHSLFHPE

SEQ ID NO: 133218 - protein, 9 aa, Homo sapiens
RHSLFHPED

SEQ ID NO: 133219 - protein, 9 aa, Homo sapiens
HSLFHPEDT

SEQ ID NO: 133220 - protein, 9 aa, Homo sapiens
SLFHPEDTG

SEQ ID NO: 133221 - protein, 9 aa, Homo sapiens
LFHPEDTGQ

SEQ ID NO: 133222 - protein, 9 aa, Homo sapiens
FHPEDTGQV

SEQ ID NO: 133223 - protein, 9 aa, Homo sapiens
HPEDTGQVF

SEQ ID NO: 133224 - protein, 9 aa, Homo sapiens
PEDTGQVFQ

SEQ ID NO: 133225 - protein, 9 aa, Homo sapiens
EDTGQVFQV

SEQ ID NO: 133226 - protein, 9 aa, Homo sapiens
DTGQVFQVS

SEQ ID NO: 133227 - protein, 9 aa, Homo sapiens
TGQVFQVSH

SEQ ID NO: 133228 - protein, 9 aa, Homo sapiens
GQVFQVSHS

SEQ ID NO: 133229 - protein, 9 aa, Homo sapiens
QVFQVSHSF

SEQ ID NO: 133230 - protein, 9 aa, Homo sapiens
VFQVSHSFP

SEQ ID NO: 133231 - protein, 9 aa, Homo sapiens
FQVSHSFPH

SEQ ID NO: 133232 - protein, 9 aa, Homo sapiens
QVSHSFPHP

SEQ ID NO: 133233 - protein, 9 aa, Homo sapiens
VSHSFPHPL

SEQ ID NO: 133234 - protein, 9 aa, Homo sapiens
SHSFPHPLY

SEQ ID NO: 133235 - protein, 9 aa, Homo sapiens
HSFPHPLYD

SEQ ID NO: 133236 - protein, 9 aa, Homo sapiens
SFPHPLYDM

SEQ ID NO: 133237 - protein, 9 aa, Homo sapiens
FPHPLYDMS

SEQ ID NO: 133238 - protein, 9 aa, Homo sapiens
PHPLYDMSL

SEQ ID NO: 133239 - protein, 9 aa, Homo sapiens
HPLYDMSLL

SEQ ID NO: 133240 - protein, 9 aa, Homo sapiens
PLYDMSLLK

SEQ ID NO: 133241 - protein, 9 aa, Homo sapiens
LYDMSLLKN

SEQ ID NO: 133242 - protein, 9 aa, Homo sapiens
YDMSLLKNR

SEQ ID NO: 133243 - protein, 9 aa, Homo sapiens
DMSLLKNRF

SEQ ID NO: 133244 - protein, 9 aa, Homo sapiens
MSLLKNRFL

SEQ ID NO: 133245 - protein, 9 aa, Homo sapiens
SLLKNRFLR

SEQ ID NO: 133246 - protein, 9 aa, Homo sapiens
LLKNRFLRP

SEQ ID NO: 133247 - protein, 9 aa, Homo sapiens
LKNRFLRPG

SEQ ID NO: 133248 - protein, 9 aa, Homo sapiens
KNRFLRPGD

SEQ ID NO: 133249 - protein, 9 aa, Homo sapiens
NRFLRPGDD

SEQ ID NO: 133250 - protein, 9 aa, Homo sapiens
RFLRPGDDS

SEQ ID NO: 133251 - protein, 9 aa, Homo sapiens
FLRPGDDSS

SEQ ID NO: 133252 - protein, 9 aa, Homo sapiens
LRPGDDSSH

SEQ ID NO: 133253 - protein, 9 aa, Homo sapiens
RPGDDSSHD

SEQ ID NO: 133254 - protein, 9 aa, Homo sapiens
PGDDSSHDL

SEQ ID NO: 133255 - protein, 9 aa, Homo sapiens
GDDSSHDLM

SEQ ID NO: 133256 - protein, 9 aa, Homo sapiens
DDSSHDLML

SEQ ID NO: 133257 - protein, 9 aa, Homo sapiens
DSSHDLMLL

SEQ ID NO: 133258 - protein, 9 aa, Homo sapiens
SSHDLMLLR

SEQ ID NO: 133259 - protein, 9 aa, Homo sapiens
SHDLMLLRL

SEQ ID NO: 133260 - protein, 9 aa, Homo sapiens
HDLMLLRLS

SEQ ID NO: 133261 - protein, 9 aa, Homo sapiens
DLMLLRLSE

SEQ ID NO: 133262 - protein, 9 aa, Homo sapiens
LMLLRLSEP

SEQ ID NO: 133263 - protein, 9 aa, Homo sapiens
MLLRLSEPA

SEQ ID NO: 133264 - protein, 9 aa, Homo sapiens
LLRLSEPAE

SEQ ID NO: 133265 - protein, 9 aa, Homo sapiens
LRLSEPAEL

SEQ ID NO: 133266 - protein, 9 aa, Homo sapiens
RLSEPAELT

SEQ ID NO: 133267 - protein, 9 aa, Homo sapiens
LSEPAELTD

SEQ ID NO: 133268 - protein, 9 aa, Homo sapiens
SEPAELTDA

SEQ ID NO: 133269 - protein, 9 aa, Homo sapiens
EPAELTDAV

SEQ ID NO: 133270 - protein, 9 aa, Homo sapiens
PAELTDAVK

SEQ ID NO: 133271 - protein, 9 aa, Homo sapiens
AELTDAVKV

SEQ ID NO: 133272 - protein, 9 aa, Homo sapiens
ELTDAVKVM

SEQ ID NO: 133273 - protein, 9 aa, Homo sapiens
LTDAVKVMD

SEQ ID NO: 133274 - protein, 9 aa, Homo sapiens
TDAVKVMDL

SEQ ID NO: 133275 - protein, 9 aa, Homo sapiens
DAVKVMDLP

SEQ ID NO: 133276 - protein, 9 aa, Homo sapiens
AVKVMDLPT

SEQ ID NO: 133277 - protein, 9 aa, Homo sapiens
VKVMDLPTQ

SEQ ID NO: 133278 - protein, 9 aa, Homo sapiens
KVMDLPTQE

SEQ ID NO: 133279 - protein, 9 aa, Homo sapiens
VMDLPTQEP

SEQ ID NO: 133280 - protein, 9 aa, Homo sapiens
MDLPTQEPA

SEQ ID NO: 133281 - protein, 9 aa, Homo sapiens
DLPTQEPAL

SEQ ID NO: 133282 - protein, 9 aa, Homo sapiens
LPTQEPALG

SEQ ID NO: 133283 - protein, 9 aa, Homo sapiens
PTQEPALGT

SEQ ID NO: 133284 - protein, 9 aa, Homo sapiens
TQEPALGTT

SEQ ID NO: 133285 - protein, 9 aa, Homo sapiens
QEPALGTTC

SEQ ID NO: 133286 - protein, 9 aa, Homo sapiens
EPALGTTCY

SEQ ID NO: 133287 - protein, 9 aa, Homo sapiens
PALGTTCYA

SEQ ID NO: 133288 - protein, 9 aa, Homo sapiens
ALGTTCYAS

SEQ ID NO: 133289 - protein, 9 aa, Homo sapiens
LGTTCYASG

SEQ ID NO: 133290 - protein, 9 aa, Homo sapiens
GTTCYASGW

SEQ ID NO: 133291 - protein, 9 aa, Homo sapiens
TTCYASGWG

SEQ ID NO: 133292 - protein, 9 aa, Homo sapiens
TCYASGWGS

SEQ ID NO: 133293 - protein, 9 aa, Homo sapiens
CYASGWGSI

SEQ ID NO: 133294 - protein, 9 aa, Homo sapiens
YASGWGSIE

SEQ ID NO: 133295 - protein, 9 aa, Homo sapiens
ASGWGSIEP

SEQ ID NO: 133296 - protein, 9 aa, Homo sapiens
SGWGSIEPE

SEQ ID NO: 133297 - protein, 9 aa, Homo sapiens
GWGSIEPEE

SEQ ID NO: 133298 - protein, 9 aa, Homo sapiens
WGSIEPEEF

SEQ ID NO: 133299 - protein, 9 aa, Homo sapiens
GSIEPEEFL

SEQ ID NO: 133300 - protein, 9 aa, Homo sapiens
SIEPEEFLT

SEQ ID NO: 133301 - protein, 9 aa, Homo sapiens
IEPEEFLTP

SEQ ID NO: 133302 - protein, 9 aa, Homo sapiens
EPEEFLTPK

SEQ ID NO: 133303 - protein, 9 aa, Homo sapiens
PEEFLTPKK

SEQ ID NO: 133304 - protein, 9 aa, Homo sapiens
EEFLTPKKL

SEQ ID NO: 133305 - protein, 9 aa, Homo sapiens
EFLTPKKLQ

SEQ ID NO: 133306 - protein, 9 aa, Homo sapiens
FLTPKKLQC

SEQ ID NO: 133307 - protein, 9 aa, Homo sapiens
LTPKKLQCV

SEQ ID NO: 133308 - protein, 9 aa, Homo sapiens
TPKKLQCVD

SEQ ID NO: 133309 - protein, 9 aa, Homo sapiens
PKKLQCVDL

SEQ ID NO: 133310 - protein, 9 aa, Homo sapiens
KKLQCVDLH

SEQ ID NO: 133311 - protein, 9 aa, Homo sapiens
KLQCVDLHV

SEQ ID NO: 133312 - protein, 9 aa, Homo sapiens
LQCVDLHVI

SEQ ID NO: 133313 - protein, 9 aa, Homo sapiens
QCVDLHVIS

SEQ ID NO: 133314 - protein, 9 aa, Homo sapiens
CVDLHVISN

SEQ ID NO: 133315 - protein, 9 aa, Homo sapiens
VDLHVISND

SEQ ID NO: 133316 - protein, 9 aa, Homo sapiens
DLHVISNDV

SEQ ID NO: 133317 - protein, 9 aa, Homo sapiens
LHVISNDVC

SEQ ID NO: 133318 - protein, 9 aa, Homo sapiens
HVISNDVCA

SEQ ID NO: 133319 - protein, 9 aa, Homo sapiens
VISNDVCAQ

SEQ ID NO: 133320 - protein, 9 aa, Homo sapiens
ISNDVCAQV

SEQ ID NO: 133321 - protein, 9 aa, Homo sapiens
SNDVCAQVH

SEQ ID NO: 133322 - protein, 9 aa, Homo sapiens
NDVCAQVHP

SEQ ID NO: 133323 - protein, 9 aa, Homo sapiens
DVCAQVHPQ

SEQ ID NO: 133324 - protein, 9 aa, Homo sapiens
VCAQVHPQK

SEQ ID NO: 133325 - protein, 9 aa, Homo sapiens
CAQVHPQKV

SEQ ID NO: 133326 - protein, 9 aa, Homo sapiens
AQVHPQKVT

SEQ ID NO: 133327 - protein, 9 aa, Homo sapiens
QVHPQKVTK

SEQ ID NO: 133328 - protein, 9 aa, Homo sapiens
VHPQKVTKF

SEQ ID NO: 133329 - protein, 9 aa, Homo sapiens
HPQKVTKFM

SEQ ID NO: 133330 - protein, 9 aa, Homo sapiens
PQKVTKFML

SEQ ID NO: 133331 - protein, 9 aa, Homo sapiens
QKVTKFMLC

SEQ ID NO: 133332 - protein, 9 aa, Homo sapiens
KVTKFMLCA

SEQ ID NO: 133333 - protein, 9 aa, Homo sapiens
VTKFMLCAG

SEQ ID NO: 133334 - protein, 9 aa, Homo sapiens
TKFMLCAGR

SEQ ID NO: 133335 - protein, 9 aa, Homo sapiens
KFMLCAGRW

SEQ ID NO: 133336 - protein, 9 aa, Homo sapiens
FMLCAGRWT

SEQ ID NO: 133337 - protein, 9 aa, Homo sapiens
MLCAGRWTG

SEQ ID NO: 133338 - protein, 9 aa, Homo sapiens
LCAGRWTGG

SEQ ID NO: 133339 - protein, 9 aa, Homo sapiens
CAGRWTGGK

SEQ ID NO: 133340 - protein, 9 aa, Homo sapiens
AGRWTGGKS

SEQ ID NO: 133341 - protein, 9 aa, Homo sapiens
GRWTGGKST

SEQ ID NO: 133342 - protein, 9 aa, Homo sapiens
RWTGGKSTC

SEQ ID NO: 133343 - protein, 9 aa, Homo sapiens
WTGGKSTCS

SEQ ID NO: 133344 - protein, 9 aa, Homo sapiens
TGGKSTCSW

SEQ ID NO: 133345 - protein, 9 aa, Homo sapiens
GGKSTCSWV

SEQ ID NO: 133346 - protein, 9 aa, Homo sapiens
GKSTCSWVI

SEQ ID NO: 133347 - protein, 9 aa, Homo sapiens
KSTCSWVIL

SEQ ID NO: 133348 - protein, 9 aa, Homo sapiens
STCSWVILI

SEQ ID NO: 133349 - protein, 9 aa, Homo sapiens
TCSWVILIT

SEQ ID NO: 133350 - protein, 9 aa, Homo sapiens
CSWVILITE

SEQ ID NO: 133351 - protein, 9 aa, Homo sapiens
SWVILITEL

SEQ ID NO: 133352 - protein, 9 aa, Homo sapiens
WVILITELT

SEQ ID NO: 133353 - protein, 9 aa, Homo sapiens
VILITELTM

SEQ ID NO: 133354 - protein, 9 aa, Homo sapiens
ILITELTMP

SEQ ID NO: 133355 - protein, 9 aa, Homo sapiens
LITELTMPA

SEQ ID NO: 133356 - protein, 9 aa, Homo sapiens
ITELTMPAL

SEQ ID NO: 133357 - protein, 9 aa, Homo sapiens
TELTMPALP

SEQ ID NO: 133358 - protein, 9 aa, Homo sapiens
ELTMPALPM

SEQ ID NO: 133359 - protein, 9 aa, Homo sapiens
LTMPALPMV

SEQ ID NO: 133360 - protein, 9 aa, Homo sapiens
TMPALPMVL

SEQ ID NO: 133361 - protein, 9 aa, Homo sapiens
MPALPMVLH

SEQ ID NO: 133362 - protein, 9 aa, Homo sapiens
PALPMVLHG

SEQ ID NO: 133363 - protein, 9 aa, Homo sapiens
ALPMVLHGS

SEQ ID NO: 133364 - protein, 9 aa, Homo sapiens
LPMVLHGSL

SEQ ID NO: 133365 - protein, 9 aa, Homo sapiens
PMVLHGSLV

SEQ ID NO: 133366 - protein, 9 aa, Homo sapiens
MVLHGSLVP

SEQ ID NO: 133367 - protein, 9 aa, Homo sapiens
VLHGSLVPW

SEQ ID NO: 133368 - protein, 9 aa, Homo sapiens
LHGSLVPWR

SEQ ID NO: 133369 - protein, 9 aa, Homo sapiens
HGSLVPWRG

SEQ ID NO: 133370 - protein, 9 aa, Homo sapiens
GSLVPWRGG

SEQ ID NO: 133371 - protein, 9 aa, Homo sapiens
SLVPWRGGV

SEQ ID NO: 133372 - protein, 9 aa, Homo sapiens
MWVPVVFLT

SEQ ID NO: 133373 - protein, 9 aa, Homo sapiens
WVPVVFLTL

SEQ ID NO: 133374 - protein, 9 aa, Homo sapiens
VPVVFLTLS

SEQ ID NO: 133375 - protein, 9 aa, Homo sapiens
PVVFLTLSV

SEQ ID NO: 133376 - protein, 9 aa, Homo sapiens
VVFLTLSVT

SEQ ID NO: 133377 - protein, 9 aa, Homo sapiens
VFLTLSVTW

SEQ ID NO: 133378 - protein, 9 aa, Homo sapiens
FLTLSVTWI

SEQ ID NO: 133379 - protein, 9 aa, Homo sapiens
LTLSVTWIG

SEQ ID NO: 133380 - protein, 9 aa, Homo sapiens
TLSVTWIGA

SEQ ID NO: 133381 - protein, 9 aa, Homo sapiens
LSVTWIGAA

SEQ ID NO: 133382 - protein, 9 aa, Homo sapiens
SVTWIGAAP

SEQ ID NO: 133383 - protein, 9 aa, Homo sapiens
VTWIGAAPL

SEQ ID NO: 133384 - protein, 9 aa, Homo sapiens
TWIGAAPLI

SEQ ID NO: 133385 - protein, 9 aa, Homo sapiens
WIGAAPLIL

SEQ ID NO: 133386 - protein, 9 aa, Homo sapiens
IGAAPLILS

SEQ ID NO: 133387 - protein, 9 aa, Homo sapiens
GAAPLILSR

SEQ ID NO: 133388 - protein, 9 aa, Homo sapiens
AAPLILSRI

SEQ ID NO: 133389 - protein, 9 aa, Homo sapiens
APLILSRIV

SEQ ID NO: 133390 - protein, 9 aa, Homo sapiens
PLILSRIVG

SEQ ID NO: 133391 - protein, 9 aa, Homo sapiens
LILSRIVGG

SEQ ID NO: 133392 - protein, 9 aa, Homo sapiens
ILSRIVGGW

SEQ ID NO: 133393 - protein, 9 aa, Homo sapiens
LSRIVGGWE

SEQ ID NO: 133394 - protein, 9 aa, Homo sapiens
SRIVGGWEC

SEQ ID NO: 133395 - protein, 9 aa, Homo sapiens
RIVGGWECE

SEQ ID NO: 133396 - protein, 9 aa, Homo sapiens
IVGGWECEK

SEQ ID NO: 133397 - protein, 9 aa, Homo sapiens
VGGWECEKH

SEQ ID NO: 133398 - protein, 9 aa, Homo sapiens
GGWECEKHS

SEQ ID NO: 133399 - protein, 9 aa, Homo sapiens
GWECEKHSQ

SEQ ID NO: 133400 - protein, 9 aa, Homo sapiens
WECEKHSQP

SEQ ID NO: 133401 - protein, 9 aa, Homo sapiens
ECEKHSQPW

SEQ ID NO: 133402 - protein, 9 aa, Homo sapiens
CEKHSQPWQ

SEQ ID NO: 133403 - protein, 9 aa, Homo sapiens
EKHSQPWQV

SEQ ID NO: 133404 - protein, 9 aa, Homo sapiens
KHSQPWQVL

SEQ ID NO: 133405 - protein, 9 aa, Homo sapiens
HSQPWQVLV

SEQ ID NO: 133406 - protein, 9 aa, Homo sapiens
SQPWQVLVA

SEQ ID NO: 133407 - protein, 9 aa, Homo sapiens
QPWQVLVAS

SEQ ID NO: 133408 - protein, 9 aa, Homo sapiens
PWQVLVASR

SEQ ID NO: 133409 - protein, 9 aa, Homo sapiens
WQVLVASRG

SEQ ID NO: 133410 - protein, 9 aa, Homo sapiens
QVLVASRGR

SEQ ID NO: 133411 - protein, 9 aa, Homo sapiens
VLVASRGRA

SEQ ID NO: 133412 - protein, 9 aa, Homo sapiens
LVASRGRAV

SEQ ID NO: 133413 - protein, 9 aa, Homo sapiens
VASRGRAVC

SEQ ID NO: 133414 - protein, 9 aa, Homo sapiens
ASRGRAVCG

SEQ ID NO: 133415 - protein, 9 aa, Homo sapiens
SRGRAVCGG

SEQ ID NO: 133416 - protein, 9 aa, Homo sapiens
RGRAVCGGV

SEQ ID NO: 133417 - protein, 9 aa, Homo sapiens
GRAVCGGVL

SEQ ID NO: 133418 - protein, 9 aa, Homo sapiens
RAVCGGVLV

SEQ ID NO: 133419 - protein, 9 aa, Homo sapiens
AVCGGVLVH

SEQ ID NO: 133420 - protein, 9 aa, Homo sapiens
VCGGVLVHP

SEQ ID NO: 133421 - protein, 9 aa, Homo sapiens
CGGVLVHPQ

SEQ ID NO: 133422 - protein, 9 aa, Homo sapiens
GGVLVHPQW

SEQ ID NO: 133423 - protein, 9 aa, Homo sapiens
GVLVHPQWV

SEQ ID NO: 133424 - protein, 9 aa, Homo sapiens
VLVHPQWVL

SEQ ID NO: 133425 - protein, 9 aa, Homo sapiens
LVHPQWVLT

SEQ ID NO: 133426 - protein, 9 aa, Homo sapiens
VHPQWVLTA

SEQ ID NO: 133427 - protein, 9 aa, Homo sapiens
HPQWVLTAA

SEQ ID NO: 133428 - protein, 9 aa, Homo sapiens
PQWVLTAAH

SEQ ID NO: 133429 - protein, 9 aa, Homo sapiens
QWVLTAAHC

SEQ ID NO: 133430 - protein, 9 aa, Homo sapiens
WVLTAAHCI

SEQ ID NO: 133431 - protein, 9 aa, Homo sapiens
VLTAAHCIR

SEQ ID NO: 133432 - protein, 9 aa, Homo sapiens
LTAAHCIRN

SEQ ID NO: 133433 - protein, 9 aa, Homo sapiens
TAAHCIRNK

SEQ ID NO: 133434 - protein, 9 aa, Homo sapiens
AAHCIRNKS

SEQ ID NO: 133435 - protein, 9 aa, Homo sapiens
AHCIRNKSV

SEQ ID NO: 133436 - protein, 9 aa, Homo sapiens
HCIRNKSVI

SEQ ID NO: 133437 - protein, 9 aa, Homo sapiens
CIRNKSVIL

SEQ ID NO: 133438 - protein, 9 aa, Homo sapiens
IRNKSVILL

SEQ ID NO: 133439 - protein, 9 aa, Homo sapiens
RNKSVILLG

SEQ ID NO: 133440 - protein, 9 aa, Homo sapiens
NKSVILLGR

SEQ ID NO: 133441 - protein, 9 aa, Homo sapiens
KSVILLGRH

SEQ ID NO: 133442 - protein, 9 aa, Homo sapiens
SVILLGRHS

SEQ ID NO: 133443 - protein, 9 aa, Homo sapiens
VILLGRHSL

SEQ ID NO: 133444 - protein, 9 aa, Homo sapiens
ILLGRHSLF

SEQ ID NO: 133445 - protein, 9 aa, Homo sapiens
LLGRHSLFH

SEQ ID NO: 133446 - protein, 9 aa, Homo sapiens
LGRHSLFHP

SEQ ID NO: 133447 - protein, 9 aa, Homo sapiens
GRHSLFHPE

SEQ ID NO: 133448 - protein, 9 aa, Homo sapiens
RHSLFHPED

SEQ ID NO: 133449 - protein, 9 aa, Homo sapiens
HSLFHPEDT

SEQ ID NO: 133450 - protein, 9 aa, Homo sapiens
SLFHPEDTG

SEQ ID NO: 133451 - protein, 9 aa, Homo sapiens
LFHPEDTGQ

SEQ ID NO: 133452 - protein, 9 aa, Homo sapiens
FHPEDTGQV

SEQ ID NO: 133453 - protein, 9 aa, Homo sapiens
HPEDTGQVF

SEQ ID NO: 133454 - protein, 9 aa, Homo sapiens
PEDTGQVFQ

SEQ ID NO: 133455 - protein, 9 aa, Homo sapiens
EDTGQVFQV

SEQ ID NO: 133456 - protein, 9 aa, Homo sapiens
DTGQVFQVS

SEQ ID NO: 133457 - protein, 9 aa, Homo sapiens
TGQVFQVSH

SEQ ID NO: 133458 - protein, 9 aa, Homo sapiens
GQVFQVSHS

SEQ ID NO: 133459 - protein, 9 aa, Homo sapiens
QVFQVSHSF

SEQ ID NO: 133460 - protein, 9 aa, Homo sapiens
VFQVSHSFP

SEQ ID NO: 133461 - protein, 9 aa, Homo sapiens
FQVSHSFPH

SEQ ID NO: 133462 - protein, 9 aa, Homo sapiens
QVSHSFPHP

SEQ ID NO: 133463 - protein, 9 aa, Homo sapiens
VSHSFPHPL

SEQ ID NO: 133464 - protein, 9 aa, Homo sapiens
SHSFPHPLY

SEQ ID NO: 133465 - protein, 9 aa, Homo sapiens
HSFPHPLYD

SEQ ID NO: 133466 - protein, 9 aa, Homo sapiens
SFPHPLYDM

SEQ ID NO: 133467 - protein, 9 aa, Homo sapiens
FPHPLYDMS

SEQ ID NO: 133468 - protein, 9 aa, Homo sapiens
PHPLYDMSL

SEQ ID NO: 133469 - protein, 9 aa, Homo sapiens
HPLYDMSLL

SEQ ID NO: 133470 - protein, 9 aa, Homo sapiens
PLYDMSLLK

SEQ ID NO: 133471 - protein, 9 aa, Homo sapiens
LYDMSLLKN

SEQ ID NO: 133472 - protein, 9 aa, Homo sapiens
YDMSLLKNR

SEQ ID NO: 133473 - protein, 9 aa, Homo sapiens
DMSLLKNRF

SEQ ID NO: 133474 - protein, 9 aa, Homo sapiens
MSLLKNRFL

SEQ ID NO: 133475 - protein, 9 aa, Homo sapiens
SLLKNRFLR

SEQ ID NO: 133476 - protein, 9 aa, Homo sapiens
LLKNRFLRP

SEQ ID NO: 133477 - protein, 9 aa, Homo sapiens
LKNRFLRPG

SEQ ID NO: 133478 - protein, 9 aa, Homo sapiens
KNRFLRPGD

SEQ ID NO: 133479 - protein, 9 aa, Homo sapiens
NRFLRPGDD

SEQ ID NO: 133480 - protein, 9 aa, Homo sapiens
RFLRPGDDS

SEQ ID NO: 133481 - protein, 9 aa, Homo sapiens
FLRPGDDSS

SEQ ID NO: 133482 - protein, 9 aa, Homo sapiens
LRPGDDSSI

SEQ ID NO: 133483 - protein, 9 aa, Homo sapiens
RPGDDSSIE

SEQ ID NO: 133484 - protein, 9 aa, Homo sapiens
PGDDSSIEP

SEQ ID NO: 133485 - protein, 9 aa, Homo sapiens
GDDSSIEPE

SEQ ID NO: 133486 - protein, 9 aa, Homo sapiens
DDSSIEPEE

SEQ ID NO: 133487 - protein, 9 aa, Homo sapiens
DSSIEPEEF

SEQ ID NO: 133488 - protein, 9 aa, Homo sapiens
SSIEPEEFL

SEQ ID NO: 133489 - protein, 9 aa, Homo sapiens
SIEPEEFLT

SEQ ID NO: 133490 - protein, 9 aa, Homo sapiens
IEPEEFLTP

SEQ ID NO: 133491 - protein, 9 aa, Homo sapiens
EPEEFLTPK

SEQ ID NO: 133492 - protein, 9 aa, Homo sapiens
PEEFLTPKK

SEQ ID NO: 133493 - protein, 9 aa, Homo sapiens
EEFLTPKKL

SEQ ID NO: 133494 - protein, 9 aa, Homo sapiens
EFLTPKKLQ

SEQ ID NO: 133495 - protein, 9 aa, Homo sapiens
FLTPKKLQC

SEQ ID NO: 133496 - protein, 9 aa, Homo sapiens
LTPKKLQCV

SEQ ID NO: 133497 - protein, 9 aa, Homo sapiens
TPKKLQCVD

SEQ ID NO: 133498 - protein, 9 aa, Homo sapiens
PKKLQCVDL

SEQ ID NO: 133499 - protein, 9 aa, Homo sapiens
KKLQCVDLH

SEQ ID NO: 133500 - protein, 9 aa, Homo sapiens
KLQCVDLHV

SEQ ID NO: 133501 - protein, 9 aa, Homo sapiens
LQCVDLHVI

SEQ ID NO: 133502 - protein, 9 aa, Homo sapiens
QCVDLHVIS

SEQ ID NO: 133503 - protein, 9 aa, Homo sapiens
CVDLHVISN

SEQ ID NO: 133504 - protein, 9 aa, Homo sapiens
VDLHVISND

SEQ ID NO: 133505 - protein, 9 aa, Homo sapiens
DLHVISNDV

SEQ ID NO: 133506 - protein, 9 aa, Homo sapiens
LHVISNDVC

SEQ ID NO: 133507 - protein, 9 aa, Homo sapiens
HVISNDVCA

SEQ ID NO: 133508 - protein, 9 aa, Homo sapiens
VISNDVCAQ

SEQ ID NO: 133509 - protein, 9 aa, Homo sapiens
ISNDVCAQV

SEQ ID NO: 133510 - protein, 9 aa, Homo sapiens
SNDVCAQVH

SEQ ID NO: 133511 - protein, 9 aa, Homo sapiens
NDVCAQVHP

SEQ ID NO: 133512 - protein, 9 aa, Homo sapiens
DVCAQVHPQ

SEQ ID NO: 133513 - protein, 9 aa, Homo sapiens
VCAQVHPQK

SEQ ID NO: 133514 - protein, 9 aa, Homo sapiens
CAQVHPQKV

SEQ ID NO: 133515 - protein, 9 aa, Homo sapiens
AQVHPQKVT

SEQ ID NO: 133516 - protein, 9 aa, Homo sapiens
QVHPQKVTK

SEQ ID NO: 133517 - protein, 9 aa, Homo sapiens
VHPQKVTKF

SEQ ID NO: 133518 - protein, 9 aa, Homo sapiens
HPQKVTKFM

SEQ ID NO: 133519 - protein, 9 aa, Homo sapiens
PQKVTKFML

SEQ ID NO: 133520 - protein, 9 aa, Homo sapiens
QKVTKFMLC

SEQ ID NO: 133521 - protein, 9 aa, Homo sapiens
KVTKFMLCA

SEQ ID NO: 133522 - protein, 9 aa, Homo sapiens
VTKFMLCAG

SEQ ID NO: 133523 - protein, 9 aa, Homo sapiens
TKFMLCAGR

SEQ ID NO: 133524 - protein, 9 aa, Homo sapiens
KFMLCAGRW

SEQ ID NO: 133525 - protein, 9 aa, Homo sapiens
FMLCAGRWT

SEQ ID NO: 133526 - protein, 9 aa, Homo sapiens
MLCAGRWTG

SEQ ID NO: 133527 - protein, 9 aa, Homo sapiens
LCAGRWTGG

SEQ ID NO: 133528 - protein, 9 aa, Homo sapiens
CAGRWTGGK

SEQ ID NO: 133529 - protein, 9 aa, Homo sapiens
AGRWTGGKS

SEQ ID NO: 133530 - protein, 9 aa, Homo sapiens
GRWTGGKST

SEQ ID NO: 133531 - protein, 9 aa, Homo sapiens
RWTGGKSTC

SEQ ID NO: 133532 - protein, 9 aa, Homo sapiens
WTGGKSTCS

SEQ ID NO: 133533 - protein, 9 aa, Homo sapiens
TGGKSTCSG

SEQ ID NO: 133534 - protein, 9 aa, Homo sapiens
GGKSTCSGD

SEQ ID NO: 133535 - protein, 9 aa, Homo sapiens
GKSTCSGDS

SEQ ID NO: 133536 - protein, 9 aa, Homo sapiens
KSTCSGDSG

SEQ ID NO: 133537 - protein, 9 aa, Homo sapiens
STCSGDSGG

SEQ ID NO: 133538 - protein, 9 aa, Homo sapiens
TCSGDSGGP

SEQ ID NO: 133539 - protein, 9 aa, Homo sapiens
CSGDSGGPL

SEQ ID NO: 133540 - protein, 9 aa, Homo sapiens
SGDSGGPLV

SEQ ID NO: 133541 - protein, 9 aa, Homo sapiens
GDSGGPLVC

SEQ ID NO: 133542 - protein, 9 aa, Homo sapiens
DSGGPLVCN

SEQ ID NO: 133543 - protein, 9 aa, Homo sapiens
SGGPLVCNG

SEQ ID NO: 133544 - protein, 9 aa, Homo sapiens
GGPLVCNGV

SEQ ID NO: 133545 - protein, 9 aa, Homo sapiens
GPLVCNGVL

SEQ ID NO: 133546 - protein, 9 aa, Homo sapiens
PLVCNGVLQ

SEQ ID NO: 133547 - protein, 9 aa, Homo sapiens
LVCNGVLQG

SEQ ID NO: 133548 - protein, 9 aa, Homo sapiens
VCNGVLQGI

SEQ ID NO: 133549 - protein, 9 aa, Homo sapiens
CNGVLQGIT

SEQ ID NO: 133550 - protein, 9 aa, Homo sapiens
NGVLQGITS

SEQ ID NO: 133551 - protein, 9 aa, Homo sapiens
GVLQGITSW

SEQ ID NO: 133552 - protein, 9 aa, Homo sapiens
VLQGITSWG

SEQ ID NO: 133553 - protein, 9 aa, Homo sapiens
LQGITSWGS

SEQ ID NO: 133554 - protein, 9 aa, Homo sapiens
QGITSWGSE

SEQ ID NO: 133555 - protein, 9 aa, Homo sapiens
GITSWGSEP

SEQ ID NO: 133556 - protein, 9 aa, Homo sapiens
ITSWGSEPC

SEQ ID NO: 133557 - protein, 9 aa, Homo sapiens
TSWGSEPCA

SEQ ID NO: 133558 - protein, 9 aa, Homo sapiens
SWGSEPCAL

SEQ ID NO: 133559 - protein, 9 aa, Homo sapiens
WGSEPCALP

SEQ ID NO: 133560 - protein, 9 aa, Homo sapiens
GSEPCALPE

SEQ ID NO: 133561 - protein, 9 aa, Homo sapiens
SEPCALPER

SEQ ID NO: 133562 - protein, 9 aa, Homo sapiens
EPCALPERP

SEQ ID NO: 133563 - protein, 9 aa, Homo sapiens
PCALPERPS

SEQ ID NO: 133564 - protein, 9 aa, Homo sapiens
CALPERPSL

SEQ ID NO: 133565 - protein, 9 aa, Homo sapiens
ALPERPSLY

SEQ ID NO: 133566 - protein, 9 aa, Homo sapiens
LPERPSLYT

SEQ ID NO: 133567 - protein, 9 aa, Homo sapiens
PERPSLYTK

SEQ ID NO: 133568 - protein, 9 aa, Homo sapiens
ERPSLYTKV

SEQ ID NO: 133569 - protein, 9 aa, Homo sapiens
RPSLYTKVV

SEQ ID NO: 133570 - protein, 9 aa, Homo sapiens
PSLYTKVVH

SEQ ID NO: 133571 - protein, 9 aa, Homo sapiens
SLYTKVVHY

SEQ ID NO: 133572 - protein, 9 aa, Homo sapiens
LYTKVVHYR

SEQ ID NO: 133573 - protein, 9 aa, Homo sapiens
YTKVVHYRK

SEQ ID NO: 133574 - protein, 9 aa, Homo sapiens
TKVVHYRKW

SEQ ID NO: 133575 - protein, 9 aa, Homo sapiens
KVVHYRKWI

SEQ ID NO: 133576 - protein, 9 aa, Homo sapiens
VVHYRKWIK

SEQ ID NO: 133577 - protein, 9 aa, Homo sapiens
VHYRKWIKD

SEQ ID NO: 133578 - protein, 9 aa, Homo sapiens
HYRKWIKDT

SEQ ID NO: 133579 - protein, 9 aa, Homo sapiens
YRKWIKDTI

SEQ ID NO: 133580 - protein, 9 aa, Homo sapiens
RKWIKDTIV

SEQ ID NO: 133581 - protein, 9 aa, Homo sapiens
KWIKDTIVA

SEQ ID NO: 133582 - protein, 9 aa, Homo sapiens
WIKDTIVAN

SEQ ID NO: 133583 - protein, 9 aa, Homo sapiens
IKDTIVANP

SEQ ID NO: 133584 - protein, 9 aa, Homo sapiens
MWVPVVFLT

SEQ ID NO: 133585 - protein, 9 aa, Homo sapiens
WVPVVFLTL

SEQ ID NO: 133586 - protein, 9 aa, Homo sapiens
VPVVFLTLS

SEQ ID NO: 133587 - protein, 9 aa, Homo sapiens
PVVFLTLSV

SEQ ID NO: 133588 - protein, 9 aa, Homo sapiens
VVFLTLSVT

SEQ ID NO: 133589 - protein, 9 aa, Homo sapiens
VFLTLSVTW

SEQ ID NO: 133590 - protein, 9 aa, Homo sapiens
FLTLSVTWI

SEQ ID NO: 133591 - protein, 9 aa, Homo sapiens
LTLSVTWIG

SEQ ID NO: 133592 - protein, 9 aa, Homo sapiens
TLSVTWIGA

SEQ ID NO: 133593 - protein, 9 aa, Homo sapiens
LSVTWIGAA

SEQ ID NO: 133594 - protein, 9 aa, Homo sapiens
SVTWIGAAP

SEQ ID NO: 133595 - protein, 9 aa, Homo sapiens
VTWIGAAPL

SEQ ID NO: 133596 - protein, 9 aa, Homo sapiens
TWIGAAPLI

SEQ ID NO: 133597 - protein, 9 aa, Homo sapiens
WIGAAPLIL

SEQ ID NO: 133598 - protein, 9 aa, Homo sapiens
IGAAPLILS

SEQ ID NO: 133599 - protein, 9 aa, Homo sapiens
GAAPLILSR

SEQ ID NO: 133600 - protein, 9 aa, Homo sapiens
AAPLILSRI

SEQ ID NO: 133601 - protein, 9 aa, Homo sapiens
APLILSRIV

SEQ ID NO: 133602 - protein, 9 aa, Homo sapiens
PLILSRIVG

SEQ ID NO: 133603 - protein, 9 aa, Homo sapiens
LILSRIVGG

SEQ ID NO: 133604 - protein, 9 aa, Homo sapiens
ILSRIVGGW

SEQ ID NO: 133605 - protein, 9 aa, Homo sapiens
LSRIVGGWE

SEQ ID NO: 133606 - protein, 9 aa, Homo sapiens
SRIVGGWEC

SEQ ID NO: 133607 - protein, 9 aa, Homo sapiens
RIVGGWECE

SEQ ID NO: 133608 - protein, 9 aa, Homo sapiens
IVGGWECEK

SEQ ID NO: 133609 - protein, 9 aa, Homo sapiens
VGGWECEKH

SEQ ID NO: 133610 - protein, 9 aa, Homo sapiens
GGWECEKHS

SEQ ID NO: 133611 - protein, 9 aa, Homo sapiens
GWECEKHSQ

SEQ ID NO: 133612 - protein, 9 aa, Homo sapiens
WECEKHSQP

SEQ ID NO: 133613 - protein, 9 aa, Homo sapiens
ECEKHSQPW

SEQ ID NO: 133614 - protein, 9 aa, Homo sapiens
CEKHSQPWQ

SEQ ID NO: 133615 - protein, 9 aa, Homo sapiens
EKHSQPWQV

SEQ ID NO: 133616 - protein, 9 aa, Homo sapiens
KHSQPWQVL

SEQ ID NO: 133617 - protein, 9 aa, Homo sapiens
HSQPWQVLV

SEQ ID NO: 133618 - protein, 9 aa, Homo sapiens
SQPWQVLVA

SEQ ID NO: 133619 - protein, 9 aa, Homo sapiens
QPWQVLVAS

SEQ ID NO: 133620 - protein, 9 aa, Homo sapiens
PWQVLVASR

SEQ ID NO: 133621 - protein, 9 aa, Homo sapiens
WQVLVASRG

SEQ ID NO: 133622 - protein, 9 aa, Homo sapiens
QVLVASRGR

SEQ ID NO: 133623 - protein, 9 aa, Homo sapiens
VLVASRGRA

SEQ ID NO: 133624 - protein, 9 aa, Homo sapiens
LVASRGRAV

SEQ ID NO: 133625 - protein, 9 aa, Homo sapiens
VASRGRAVC

SEQ ID NO: 133626 - protein, 9 aa, Homo sapiens
ASRGRAVCG

SEQ ID NO: 133627 - protein, 9 aa, Homo sapiens
SRGRAVCGG

SEQ ID NO: 133628 - protein, 9 aa, Homo sapiens
RGRAVCGGV

SEQ ID NO: 133629 - protein, 9 aa, Homo sapiens
GRAVCGGVL

SEQ ID NO: 133630 - protein, 9 aa, Homo sapiens
RAVCGGVLV

SEQ ID NO: 133631 - protein, 9 aa, Homo sapiens
AVCGGVLVH

SEQ ID NO: 133632 - protein, 9 aa, Homo sapiens
VCGGVLVHP

SEQ ID NO: 133633 - protein, 9 aa, Homo sapiens
CGGVLVHPQ

SEQ ID NO: 133634 - protein, 9 aa, Homo sapiens
GGVLVHPQW

SEQ ID NO: 133635 - protein, 9 aa, Homo sapiens
GVLVHPQWV

SEQ ID NO: 133636 - protein, 9 aa, Homo sapiens
VLVHPQWVL

SEQ ID NO: 133637 - protein, 9 aa, Homo sapiens
LVHPQWVLT

SEQ ID NO: 133638 - protein, 9 aa, Homo sapiens
VHPQWVLTA

SEQ ID NO: 133639 - protein, 9 aa, Homo sapiens
HPQWVLTAA

SEQ ID NO: 133640 - protein, 9 aa, Homo sapiens
PQWVLTAAH

SEQ ID NO: 133641 - protein, 9 aa, Homo sapiens
QWVLTAAHC

SEQ ID NO: 133642 - protein, 9 aa, Homo sapiens
WVLTAAHCI

SEQ ID NO: 133643 - protein, 9 aa, Homo sapiens
VLTAAHCIR

SEQ ID NO: 133644 - protein, 9 aa, Homo sapiens
LTAAHCIRK

SEQ ID NO: 133645 - protein, 9 aa, Homo sapiens
TAAHCIRKP

SEQ ID NO: 133646 - protein, 9 aa, Homo sapiens
AAHCIRKPG

SEQ ID NO: 133647 - protein, 9 aa, Homo sapiens
AHCIRKPGD

SEQ ID NO: 133648 - protein, 9 aa, Homo sapiens
HCIRKPGDD

SEQ ID NO: 133649 - protein, 9 aa, Homo sapiens
CIRKPGDDS

SEQ ID NO: 133650 - protein, 9 aa, Homo sapiens
IRKPGDDSS

SEQ ID NO: 133651 - protein, 9 aa, Homo sapiens
RKPGDDSSH

SEQ ID NO: 133652 - protein, 9 aa, Homo sapiens
KPGDDSSHD

SEQ ID NO: 133653 - protein, 9 aa, Homo sapiens
PGDDSSHDL

SEQ ID NO: 133654 - protein, 9 aa, Homo sapiens
GDDSSHDLM

SEQ ID NO: 133655 - protein, 9 aa, Homo sapiens
DDSSHDLML

SEQ ID NO: 133656 - protein, 9 aa, Homo sapiens
DSSHDLMLL

SEQ ID NO: 133657 - protein, 9 aa, Homo sapiens
SSHDLMLLR

SEQ ID NO: 133658 - protein, 9 aa, Homo sapiens
SHDLMLLRL

SEQ ID NO: 133659 - protein, 9 aa, Homo sapiens
HDLMLLRLS

SEQ ID NO: 133660 - protein, 9 aa, Homo sapiens
DLMLLRLSE

SEQ ID NO: 133661 - protein, 9 aa, Homo sapiens
LMLLRLSEP

SEQ ID NO: 133662 - protein, 9 aa, Homo sapiens
MLLRLSEPA

SEQ ID NO: 133663 - protein, 9 aa, Homo sapiens
LLRLSEPAE

SEQ ID NO: 133664 - protein, 9 aa, Homo sapiens
LRLSEPAEL

SEQ ID NO: 133665 - protein, 9 aa, Homo sapiens
RLSEPAELT

SEQ ID NO: 133666 - protein, 9 aa, Homo sapiens
LSEPAELTD

SEQ ID NO: 133667 - protein, 9 aa, Homo sapiens
SEPAELTDA

SEQ ID NO: 133668 - protein, 9 aa, Homo sapiens
EPAELTDAV

SEQ ID NO: 133669 - protein, 9 aa, Homo sapiens
PAELTDAVK

SEQ ID NO: 133670 - protein, 9 aa, Homo sapiens
AELTDAVKV

SEQ ID NO: 133671 - protein, 9 aa, Homo sapiens
ELTDAVKVM

SEQ ID NO: 133672 - protein, 9 aa, Homo sapiens
LTDAVKVMD

SEQ ID NO: 133673 - protein, 9 aa, Homo sapiens
TDAVKVMDL

SEQ ID NO: 133674 - protein, 9 aa, Homo sapiens
DAVKVMDLP

SEQ ID NO: 133675 - protein, 9 aa, Homo sapiens
AVKVMDLPT

SEQ ID NO: 133676 - protein, 9 aa, Homo sapiens
VKVMDLPTQ

SEQ ID NO: 133677 - protein, 9 aa, Homo sapiens
KVMDLPTQE

SEQ ID NO: 133678 - protein, 9 aa, Homo sapiens
VMDLPTQEP

SEQ ID NO: 133679 - protein, 9 aa, Homo sapiens
MDLPTQEPA

SEQ ID NO: 133680 - protein, 9 aa, Homo sapiens
DLPTQEPAL

SEQ ID NO: 133681 - protein, 9 aa, Homo sapiens
LPTQEPALG

SEQ ID NO: 133682 - protein, 9 aa, Homo sapiens
PTQEPALGT

SEQ ID NO: 133683 - protein, 9 aa, Homo sapiens
TQEPALGTT

SEQ ID NO: 133684 - protein, 9 aa, Homo sapiens
QEPALGTTC

SEQ ID NO: 133685 - protein, 9 aa, Homo sapiens
EPALGTTCY

SEQ ID NO: 133686 - protein, 9 aa, Homo sapiens
PALGTTCYA

SEQ ID NO: 133687 - protein, 9 aa, Homo sapiens
ALGTTCYAS

SEQ ID NO: 133688 - protein, 9 aa, Homo sapiens
LGTTCYASG

SEQ ID NO: 133689 - protein, 9 aa, Homo sapiens
GTTCYASGW

SEQ ID NO: 133690 - protein, 9 aa, Homo sapiens
TTCYASGWG

SEQ ID NO: 133691 - protein, 9 aa, Homo sapiens
TCYASGWGS

SEQ ID NO: 133692 - protein, 9 aa, Homo sapiens
CYASGWGSI

SEQ ID NO: 133693 - protein, 9 aa, Homo sapiens
YASGWGSIE

SEQ ID NO: 133694 - protein, 9 aa, Homo sapiens
ASGWGSIEP

SEQ ID NO: 133695 - protein, 9 aa, Homo sapiens
SGWGSIEPE

SEQ ID NO: 133696 - protein, 9 aa, Homo sapiens
GWGSIEPEE

SEQ ID NO: 133697 - protein, 9 aa, Homo sapiens
WGSIEPEEF

SEQ ID NO: 133698 - protein, 9 aa, Homo sapiens
GSIEPEEFL

SEQ ID NO: 133699 - protein, 9 aa, Homo sapiens
SIEPEEFLT

SEQ ID NO: 133700 - protein, 9 aa, Homo sapiens
IEPEEFLTP

SEQ ID NO: 133701 - protein, 9 aa, Homo sapiens
EPEEFLTPK

SEQ ID NO: 133702 - protein, 9 aa, Homo sapiens
PEEFLTPKK

SEQ ID NO: 133703 - protein, 9 aa, Homo sapiens
EEFLTPKKL

SEQ ID NO: 133704 - protein, 9 aa, Homo sapiens
EFLTPKKLQ

SEQ ID NO: 133705 - protein, 9 aa, Homo sapiens
FLTPKKLQC

SEQ ID NO: 133706 - protein, 9 aa, Homo sapiens
LTPKKLQCV

SEQ ID NO: 133707 - protein, 9 aa, Homo sapiens
TPKKLQCVD

SEQ ID NO: 133708 - protein, 9 aa, Homo sapiens
PKKLQCVDL

SEQ ID NO: 133709 - protein, 9 aa, Homo sapiens
KKLQCVDLH

SEQ ID NO: 133710 - protein, 9 aa, Homo sapiens
KLQCVDLHV

SEQ ID NO: 133711 - protein, 9 aa, Homo sapiens
LQCVDLHVI

SEQ ID NO: 133712 - protein, 9 aa, Homo sapiens
QCVDLHVIS

SEQ ID NO: 133713 - protein, 9 aa, Homo sapiens
CVDLHVISN

SEQ ID NO: 133714 - protein, 9 aa, Homo sapiens
VDLHVISND

SEQ ID NO: 133715 - protein, 9 aa, Homo sapiens
DLHVISNDV

SEQ ID NO: 133716 - protein, 9 aa, Homo sapiens
LHVISNDVC

SEQ ID NO: 133717 - protein, 9 aa, Homo sapiens
HVISNDVCA

SEQ ID NO: 133718 - protein, 9 aa, Homo sapiens
VISNDVCAQ

SEQ ID NO: 133719 - protein, 9 aa, Homo sapiens
ISNDVCAQV

SEQ ID NO: 133720 - protein, 9 aa, Homo sapiens
SNDVCAQVH

SEQ ID NO: 133721 - protein, 9 aa, Homo sapiens
NDVCAQVHP

SEQ ID NO: 133722 - protein, 9 aa, Homo sapiens
DVCAQVHPQ

SEQ ID NO: 133723 - protein, 9 aa, Homo sapiens
VCAQVHPQK

SEQ ID NO: 133724 - protein, 9 aa, Homo sapiens
CAQVHPQKV

SEQ ID NO: 133725 - protein, 9 aa, Homo sapiens
AQVHPQKVT

SEQ ID NO: 133726 - protein, 9 aa, Homo sapiens
QVHPQKVTK

SEQ ID NO: 133727 - protein, 9 aa, Homo sapiens
VHPQKVTKF

SEQ ID NO: 133728 - protein, 9 aa, Homo sapiens
HPQKVTKFM

SEQ ID NO: 133729 - protein, 9 aa, Homo sapiens
PQKVTKFML

SEQ ID NO: 133730 - protein, 9 aa, Homo sapiens
QKVTKFMLC

SEQ ID NO: 133731 - protein, 9 aa, Homo sapiens
KVTKFMLCA

SEQ ID NO: 133732 - protein, 9 aa, Homo sapiens
VTKFMLCAG

SEQ ID NO: 133733 - protein, 9 aa, Homo sapiens
TKFMLCAGR

SEQ ID NO: 133734 - protein, 9 aa, Homo sapiens
KFMLCAGRW

SEQ ID NO: 133735 - protein, 9 aa, Homo sapiens
FMLCAGRWT

SEQ ID NO: 133736 - protein, 9 aa, Homo sapiens
MLCAGRWTG

SEQ ID NO: 133737 - protein, 9 aa, Homo sapiens
LCAGRWTGG

SEQ ID NO: 133738 - protein, 9 aa, Homo sapiens
CAGRWTGGK

SEQ ID NO: 133739 - protein, 9 aa, Homo sapiens
AGRWTGGKS

SEQ ID NO: 133740 - protein, 9 aa, Homo sapiens
GRWTGGKST

SEQ ID NO: 133741 - protein, 9 aa, Homo sapiens
RWTGGKSTC

SEQ ID NO: 133742 - protein, 9 aa, Homo sapiens
WTGGKSTCS

SEQ ID NO: 133743 - protein, 9 aa, Homo sapiens
TGGKSTCSG

SEQ ID NO: 133744 - protein, 9 aa, Homo sapiens
GGKSTCSGD

SEQ ID NO: 133745 - protein, 9 aa, Homo sapiens
GKSTCSGDS

SEQ ID NO: 133746 - protein, 9 aa, Homo sapiens
KSTCSGDSG

SEQ ID NO: 133747 - protein, 9 aa, Homo sapiens
STCSGDSGG

SEQ ID NO: 133748 - protein, 9 aa, Homo sapiens
TCSGDSGGP

SEQ ID NO: 133749 - protein, 9 aa, Homo sapiens
CSGDSGGPL

SEQ ID NO: 133750 - protein, 9 aa, Homo sapiens
SGDSGGPLV

SEQ ID NO: 133751 - protein, 9 aa, Homo sapiens
GDSGGPLVC

SEQ ID NO: 133752 - protein, 9 aa, Homo sapiens
DSGGPLVCN

SEQ ID NO: 133753 - protein, 9 aa, Homo sapiens
SGGPLVCNG

SEQ ID NO: 133754 - protein, 9 aa, Homo sapiens
GGPLVCNGV

SEQ ID NO: 133755 - protein, 9 aa, Homo sapiens
GPLVCNGVL

SEQ ID NO: 133756 - protein, 9 aa, Homo sapiens
PLVCNGVLQ

SEQ ID NO: 133757 - protein, 9 aa, Homo sapiens
LVCNGVLQG

SEQ ID NO: 133758 - protein, 9 aa, Homo sapiens
VCNGVLQGI

SEQ ID NO: 133759 - protein, 9 aa, Homo sapiens
CNGVLQGIT

SEQ ID NO: 133760 - protein, 9 aa, Homo sapiens
NGVLQGITS

SEQ ID NO: 133761 - protein, 9 aa, Homo sapiens
GVLQGITSW

SEQ ID NO: 133762 - protein, 9 aa, Homo sapiens
VLQGITSWG

SEQ ID NO: 133763 - protein, 9 aa, Homo sapiens
LQGITSWGS

SEQ ID NO: 133764 - protein, 9 aa, Homo sapiens
QGITSWGSE

SEQ ID NO: 133765 - protein, 9 aa, Homo sapiens
GITSWGSEP

SEQ ID NO: 133766 - protein, 9 aa, Homo sapiens
ITSWGSEPC

SEQ ID NO: 133767 - protein, 9 aa, Homo sapiens
TSWGSEPCA

SEQ ID NO: 133768 - protein, 9 aa, Homo sapiens
SWGSEPCAL

SEQ ID NO: 133769 - protein, 9 aa, Homo sapiens
WGSEPCALP

SEQ ID NO: 133770 - protein, 9 aa, Homo sapiens
GSEPCALPE

SEQ ID NO: 133771 - protein, 9 aa, Homo sapiens
SEPCALPER

SEQ ID NO: 133772 - protein, 9 aa, Homo sapiens
EPCALPERP

SEQ ID NO: 133773 - protein, 9 aa, Homo sapiens
PCALPERPS

SEQ ID NO: 133774 - protein, 9 aa, Homo sapiens
CALPERPSL

SEQ ID NO: 133775 - protein, 9 aa, Homo sapiens
ALPERPSLY

SEQ ID NO: 133776 - protein, 9 aa, Homo sapiens
LPERPSLYT

SEQ ID NO: 133777 - protein, 9 aa, Homo sapiens
PERPSLYTK

SEQ ID NO: 133778 - protein, 9 aa, Homo sapiens
ERPSLYTKV

SEQ ID NO: 133779 - protein, 9 aa, Homo sapiens
RPSLYTKVV

SEQ ID NO: 133780 - protein, 9 aa, Homo sapiens
PSLYTKVVH

SEQ ID NO: 133781 - protein, 9 aa, Homo sapiens
SLYTKVVHY

SEQ ID NO: 133782 - protein, 9 aa, Homo sapiens
LYTKVVHYR

SEQ ID NO: 133783 - protein, 9 aa, Homo sapiens
YTKVVHYRK

SEQ ID NO: 133784 - protein, 9 aa, Homo sapiens
TKVVHYRKW

SEQ ID NO: 133785 - protein, 9 aa, Homo sapiens
KVVHYRKWI

SEQ ID NO: 133786 - protein, 9 aa, Homo sapiens
VVHYRKWIK

SEQ ID NO: 133787 - protein, 9 aa, Homo sapiens
VHYRKWIKD

SEQ ID NO: 133788 - protein, 9 aa, Homo sapiens
HYRKWIKDT

SEQ ID NO: 133789 - protein, 9 aa, Homo sapiens
YRKWIKDTI

SEQ ID NO: 133790 - protein, 9 aa, Homo sapiens
RKWIKDTIV

SEQ ID NO: 133791 - protein, 9 aa, Homo sapiens
KWIKDTIVA

SEQ ID NO: 133792 - protein, 9 aa, Homo sapiens
WIKDTIVAN

SEQ ID NO: 133793 - protein, 9 aa, Homo sapiens
IKDTIVANP

SEQ ID NO: 133794 - protein, 9 aa, Homo sapiens
MYNGIGLPT

SEQ ID NO: 133795 - protein, 9 aa, Homo sapiens
YNGIGLPTP

SEQ ID NO: 133796 - protein, 9 aa, Homo sapiens
NGIGLPTPR

SEQ ID NO: 133797 - protein, 9 aa, Homo sapiens
GIGLPTPRG

SEQ ID NO: 133798 - protein, 9 aa, Homo sapiens
IGLPTPRGS

SEQ ID NO: 133799 - protein, 9 aa, Homo sapiens
GLPTPRGSG

SEQ ID NO: 133800 - protein, 9 aa, Homo sapiens
LPTPRGSGT

SEQ ID NO: 133801 - protein, 9 aa, Homo sapiens
PTPRGSGTN

SEQ ID NO: 133802 - protein, 9 aa, Homo sapiens
TPRGSGTNG

SEQ ID NO: 133803 - protein, 9 aa, Homo sapiens
PRGSGTNGY

SEQ ID NO: 133804 - protein, 9 aa, Homo sapiens
RGSGTNGYV

SEQ ID NO: 133805 - protein, 9 aa, Homo sapiens
GSGTNGYVQ

SEQ ID NO: 133806 - protein, 9 aa, Homo sapiens
SGTNGYVQR

SEQ ID NO: 133807 - protein, 9 aa, Homo sapiens
GTNGYVQRN

SEQ ID NO: 133808 - protein, 9 aa, Homo sapiens
TNGYVQRNL

SEQ ID NO: 133809 - protein, 9 aa, Homo sapiens
NGYVQRNLS

SEQ ID NO: 133810 - protein, 9 aa, Homo sapiens
GYVQRNLSL

SEQ ID NO: 133811 - protein, 9 aa, Homo sapiens
YVQRNLSLV

SEQ ID NO: 133812 - protein, 9 aa, Homo sapiens
VQRNLSLVR

SEQ ID NO: 133813 - protein, 9 aa, Homo sapiens
QRNLSLVRG

SEQ ID NO: 133814 - protein, 9 aa, Homo sapiens
RNLSLVRGR

SEQ ID NO: 133815 - protein, 9 aa, Homo sapiens
NLSLVRGRR

SEQ ID NO: 133816 - protein, 9 aa, Homo sapiens
LSLVRGRRG

SEQ ID NO: 133817 - protein, 9 aa, Homo sapiens
SLVRGRRGE

SEQ ID NO: 133818 - protein, 9 aa, Homo sapiens
LVRGRRGER

SEQ ID NO: 133819 - protein, 9 aa, Homo sapiens
VRGRRGERP

SEQ ID NO: 133820 - protein, 9 aa, Homo sapiens
RGRRGERPD

SEQ ID NO: 133821 - protein, 9 aa, Homo sapiens
GRRGERPDY

SEQ ID NO: 133822 - protein, 9 aa, Homo sapiens
RRGERPDYK

SEQ ID NO: 133823 - protein, 9 aa, Homo sapiens
RGERPDYKG

SEQ ID NO: 133824 - protein, 9 aa, Homo sapiens
GERPDYKGE

SEQ ID NO: 133825 - protein, 9 aa, Homo sapiens
ERPDYKGEE

SEQ ID NO: 133826 - protein, 9 aa, Homo sapiens
RPDYKGEEE

SEQ ID NO: 133827 - protein, 9 aa, Homo sapiens
PDYKGEEEL

SEQ ID NO: 133828 - protein, 9 aa, Homo sapiens
DYKGEEELR

SEQ ID NO: 133829 - protein, 9 aa, Homo sapiens
YKGEEELRR

SEQ ID NO: 133830 - protein, 9 aa, Homo sapiens
KGEEELRRL

SEQ ID NO: 133831 - protein, 9 aa, Homo sapiens
GEEELRRLE

SEQ ID NO: 133832 - protein, 9 aa, Homo sapiens
EEELRRLEA

SEQ ID NO: 133833 - protein, 9 aa, Homo sapiens
EELRRLEAA

SEQ ID NO: 133834 - protein, 9 aa, Homo sapiens
ELRRLEAAL

SEQ ID NO: 133835 - protein, 9 aa, Homo sapiens
LRRLEAALV

SEQ ID NO: 133836 - protein, 9 aa, Homo sapiens
RRLEAALVK

SEQ ID NO: 133837 - protein, 9 aa, Homo sapiens
RLEAALVKR

SEQ ID NO: 133838 - protein, 9 aa, Homo sapiens
LEAALVKRP

SEQ ID NO: 133839 - protein, 9 aa, Homo sapiens
EAALVKRPN

SEQ ID NO: 133840 - protein, 9 aa, Homo sapiens
AALVKRPNP

SEQ ID NO: 133841 - protein, 9 aa, Homo sapiens
ALVKRPNPD

SEQ ID NO: 133842 - protein, 9 aa, Homo sapiens
LVKRPNPDI

SEQ ID NO: 133843 - protein, 9 aa, Homo sapiens
VKRPNPDIL

SEQ ID NO: 133844 - protein, 9 aa, Homo sapiens
KRPNPDILD

SEQ ID NO: 133845 - protein, 9 aa, Homo sapiens
RPNPDILDH

SEQ ID NO: 133846 - protein, 9 aa, Homo sapiens
PNPDILDHE

SEQ ID NO: 133847 - protein, 9 aa, Homo sapiens
NPDILDHER

SEQ ID NO: 133848 - protein, 9 aa, Homo sapiens
PDILDHERK

SEQ ID NO: 133849 - protein, 9 aa, Homo sapiens
DILDHERKR

SEQ ID NO: 133850 - protein, 9 aa, Homo sapiens
ILDHERKRR

SEQ ID NO: 133851 - protein, 9 aa, Homo sapiens
LDHERKRRV

SEQ ID NO: 133852 - protein, 9 aa, Homo sapiens
DHERKRRVE

SEQ ID NO: 133853 - protein, 9 aa, Homo sapiens
HERKRRVEL

SEQ ID NO: 133854 - protein, 9 aa, Homo sapiens
ERKRRVELR

SEQ ID NO: 133855 - protein, 9 aa, Homo sapiens
RKRRVELRC

SEQ ID NO: 133856 - protein, 9 aa, Homo sapiens
KRRVELRCL

SEQ ID NO: 133857 - protein, 9 aa, Homo sapiens
RRVELRCLE

SEQ ID NO: 133858 - protein, 9 aa, Homo sapiens
RVELRCLEL

SEQ ID NO: 133859 - protein, 9 aa, Homo sapiens
VELRCLELE

SEQ ID NO: 133860 - protein, 9 aa, Homo sapiens
ELRCLELEE

SEQ ID NO: 133861 - protein, 9 aa, Homo sapiens
LRCLELEEM

SEQ ID NO: 133862 - protein, 9 aa, Homo sapiens
RCLELEEMM

SEQ ID NO: 133863 - protein, 9 aa, Homo sapiens
CLELEEMME

SEQ ID NO: 133864 - protein, 9 aa, Homo sapiens
LELEEMMEE

SEQ ID NO: 133865 - protein, 9 aa, Homo sapiens
ELEEMMEEQ

SEQ ID NO: 133866 - protein, 9 aa, Homo sapiens
LEEMMEEQG

SEQ ID NO: 133867 - protein, 9 aa, Homo sapiens
EEMMEEQGY

SEQ ID NO: 133868 - protein, 9 aa, Homo sapiens
EMMEEQGYE

SEQ ID NO: 133869 - protein, 9 aa, Homo sapiens
MMEEQGYEE

SEQ ID NO: 133870 - protein, 9 aa, Homo sapiens
MEEQGYEEQ

SEQ ID NO: 133871 - protein, 9 aa, Homo sapiens
EEQGYEEQQ

SEQ ID NO: 133872 - protein, 9 aa, Homo sapiens
EQGYEEQQI

SEQ ID NO: 133873 - protein, 9 aa, Homo sapiens
QGYEEQQIQ

SEQ ID NO: 133874 - protein, 9 aa, Homo sapiens
GYEEQQIQE

SEQ ID NO: 133875 - protein, 9 aa, Homo sapiens
YEEQQIQEK

SEQ ID NO: 133876 - protein, 9 aa, Homo sapiens
EEQQIQEKV

SEQ ID NO: 133877 - protein, 9 aa, Homo sapiens
EQQIQEKVA

SEQ ID NO: 133878 - protein, 9 aa, Homo sapiens
QQIQEKVAT

SEQ ID NO: 133879 - protein, 9 aa, Homo sapiens
QIQEKVATF

SEQ ID NO: 133880 - protein, 9 aa, Homo sapiens
IQEKVATFR

SEQ ID NO: 133881 - protein, 9 aa, Homo sapiens
QEKVATFRL

SEQ ID NO: 133882 - protein, 9 aa, Homo sapiens
EKVATFRLM

SEQ ID NO: 133883 - protein, 9 aa, Homo sapiens
KVATFRLML

SEQ ID NO: 133884 - protein, 9 aa, Homo sapiens
VATFRLMLL

SEQ ID NO: 133885 - protein, 9 aa, Homo sapiens
ATFRLMLLE

SEQ ID NO: 133886 - protein, 9 aa, Homo sapiens
TFRLMLLEK

SEQ ID NO: 133887 - protein, 9 aa, Homo sapiens
FRLMLLEKD

SEQ ID NO: 133888 - protein, 9 aa, Homo sapiens
RLMLLEKDV

SEQ ID NO: 133889 - protein, 9 aa, Homo sapiens
LMLLEKDVN

SEQ ID NO: 133890 - protein, 9 aa, Homo sapiens
MLLEKDVNP

SEQ ID NO: 133891 - protein, 9 aa, Homo sapiens
LLEKDVNPG

SEQ ID NO: 133892 - protein, 9 aa, Homo sapiens
LEKDVNPGG

SEQ ID NO: 133893 - protein, 9 aa, Homo sapiens
EKDVNPGGK

SEQ ID NO: 133894 - protein, 9 aa, Homo sapiens
KDVNPGGKE

SEQ ID NO: 133895 - protein, 9 aa, Homo sapiens
DVNPGGKEE

SEQ ID NO: 133896 - protein, 9 aa, Homo sapiens
VNPGGKEET

SEQ ID NO: 133897 - protein, 9 aa, Homo sapiens
NPGGKEETP

SEQ ID NO: 133898 - protein, 9 aa, Homo sapiens
PGGKEETPG

SEQ ID NO: 133899 - protein, 9 aa, Homo sapiens
GGKEETPGQ

SEQ ID NO: 133900 - protein, 9 aa, Homo sapiens
GKEETPGQR

SEQ ID NO: 133901 - protein, 9 aa, Homo sapiens
KEETPGQRP

SEQ ID NO: 133902 - protein, 9 aa, Homo sapiens
EETPGQRPA

SEQ ID NO: 133903 - protein, 9 aa, Homo sapiens
ETPGQRPAV

SEQ ID NO: 133904 - protein, 9 aa, Homo sapiens
TPGQRPAVT

SEQ ID NO: 133905 - protein, 9 aa, Homo sapiens
PGQRPAVTE

SEQ ID NO: 133906 - protein, 9 aa, Homo sapiens
GQRPAVTET

SEQ ID NO: 133907 - protein, 9 aa, Homo sapiens
QRPAVTETH

SEQ ID NO: 133908 - protein, 9 aa, Homo sapiens
RPAVTETHQ

SEQ ID NO: 133909 - protein, 9 aa, Homo sapiens
PAVTETHQL

SEQ ID NO: 133910 - protein, 9 aa, Homo sapiens
AVTETHQLA

SEQ ID NO: 133911 - protein, 9 aa, Homo sapiens
VTETHQLAE

SEQ ID NO: 133912 - protein, 9 aa, Homo sapiens
TETHQLAEL

SEQ ID NO: 133913 - protein, 9 aa, Homo sapiens
ETHQLAELN

SEQ ID NO: 133914 - protein, 9 aa, Homo sapiens
THQLAELNE

SEQ ID NO: 133915 - protein, 9 aa, Homo sapiens
HQLAELNEK

SEQ ID NO: 133916 - protein, 9 aa, Homo sapiens
QLAELNEKK

SEQ ID NO: 133917 - protein, 9 aa, Homo sapiens
LAELNEKKN

SEQ ID NO: 133918 - protein, 9 aa, Homo sapiens
AELNEKKNE

SEQ ID NO: 133919 - protein, 9 aa, Homo sapiens
ELNEKKNER

SEQ ID NO: 133920 - protein, 9 aa, Homo sapiens
LNEKKNERL

SEQ ID NO: 133921 - protein, 9 aa, Homo sapiens
NEKKNERLR

SEQ ID NO: 133922 - protein, 9 aa, Homo sapiens
EKKNERLRA

SEQ ID NO: 133923 - protein, 9 aa, Homo sapiens
KKNERLRAA

SEQ ID NO: 133924 - protein, 9 aa, Homo sapiens
KNERLRAAF

SEQ ID NO: 133925 - protein, 9 aa, Homo sapiens
NERLRAAFG

SEQ ID NO: 133926 - protein, 9 aa, Homo sapiens
ERLRAAFGI

SEQ ID NO: 133927 - protein, 9 aa, Homo sapiens
RLRAAFGIS

SEQ ID NO: 133928 - protein, 9 aa, Homo sapiens
LRAAFGISD

SEQ ID NO: 133929 - protein, 9 aa, Homo sapiens
RAAFGISDS

SEQ ID NO: 133930 - protein, 9 aa, Homo sapiens
AAFGISDSY

SEQ ID NO: 133931 - protein, 9 aa, Homo sapiens
AFGISDSYV

SEQ ID NO: 133932 - protein, 9 aa, Homo sapiens
FGISDSYVD

SEQ ID NO: 133933 - protein, 9 aa, Homo sapiens
GISDSYVDG

SEQ ID NO: 133934 - protein, 9 aa, Homo sapiens
ISDSYVDGS

SEQ ID NO: 133935 - protein, 9 aa, Homo sapiens
SDSYVDGSS

SEQ ID NO: 133936 - protein, 9 aa, Homo sapiens
DSYVDGSSF

SEQ ID NO: 133937 - protein, 9 aa, Homo sapiens
SYVDGSSFD

SEQ ID NO: 133938 - protein, 9 aa, Homo sapiens
YVDGSSFDP

SEQ ID NO: 133939 - protein, 9 aa, Homo sapiens
VDGSSFDPQ

SEQ ID NO: 133940 - protein, 9 aa, Homo sapiens
DGSSFDPQR

SEQ ID NO: 133941 - protein, 9 aa, Homo sapiens
GSSFDPQRR

SEQ ID NO: 133942 - protein, 9 aa, Homo sapiens
SSFDPQRRA

SEQ ID NO: 133943 - protein, 9 aa, Homo sapiens
SFDPQRRAR

SEQ ID NO: 133944 - protein, 9 aa, Homo sapiens
FDPQRRARE

SEQ ID NO: 133945 - protein, 9 aa, Homo sapiens
DPQRRAREA

SEQ ID NO: 133946 - protein, 9 aa, Homo sapiens
PQRRAREAK

SEQ ID NO: 133947 - protein, 9 aa, Homo sapiens
QRRAREAKQ

SEQ ID NO: 133948 - protein, 9 aa, Homo sapiens
RRAREAKQP

SEQ ID NO: 133949 - protein, 9 aa, Homo sapiens
RAREAKQPA

SEQ ID NO: 133950 - protein, 9 aa, Homo sapiens
AREAKQPAP

SEQ ID NO: 133951 - protein, 9 aa, Homo sapiens
REAKQPAPE

SEQ ID NO: 133952 - protein, 9 aa, Homo sapiens
EAKQPAPEP

SEQ ID NO: 133953 - protein, 9 aa, Homo sapiens
AKQPAPEPP

SEQ ID NO: 133954 - protein, 9 aa, Homo sapiens
KQPAPEPPK

SEQ ID NO: 133955 - protein, 9 aa, Homo sapiens
QPAPEPPKP

SEQ ID NO: 133956 - protein, 9 aa, Homo sapiens
PAPEPPKPY

SEQ ID NO: 133957 - protein, 9 aa, Homo sapiens
APEPPKPYS

SEQ ID NO: 133958 - protein, 9 aa, Homo sapiens
PEPPKPYSL

SEQ ID NO: 133959 - protein, 9 aa, Homo sapiens
EPPKPYSLV

SEQ ID NO: 133960 - protein, 9 aa, Homo sapiens
PPKPYSLVR

SEQ ID NO: 133961 - protein, 9 aa, Homo sapiens
PKPYSLVRE

SEQ ID NO: 133962 - protein, 9 aa, Homo sapiens
KPYSLVRES

SEQ ID NO: 133963 - protein, 9 aa, Homo sapiens
PYSLVRESS

SEQ ID NO: 133964 - protein, 9 aa, Homo sapiens
YSLVRESSS

SEQ ID NO: 133965 - protein, 9 aa, Homo sapiens
SLVRESSSS

SEQ ID NO: 133966 - protein, 9 aa, Homo sapiens
LVRESSSSR

SEQ ID NO: 133967 - protein, 9 aa, Homo sapiens
VRESSSSRS

SEQ ID NO: 133968 - protein, 9 aa, Homo sapiens
RESSSSRSP

SEQ ID NO: 133969 - protein, 9 aa, Homo sapiens
ESSSSRSPT

SEQ ID NO: 133970 - protein, 9 aa, Homo sapiens
SSSSRSPTP

SEQ ID NO: 133971 - protein, 9 aa, Homo sapiens
SSSRSPTPK

SEQ ID NO: 133972 - protein, 9 aa, Homo sapiens
SSRSPTPKQ

SEQ ID NO: 133973 - protein, 9 aa, Homo sapiens
SRSPTPKQK

SEQ ID NO: 133974 - protein, 9 aa, Homo sapiens
RSPTPKQKK

SEQ ID NO: 133975 - protein, 9 aa, Homo sapiens
SPTPKQKKK

SEQ ID NO: 133976 - protein, 9 aa, Homo sapiens
PTPKQKKKK

SEQ ID NO: 133977 - protein, 9 aa, Homo sapiens
TPKQKKKKK

SEQ ID NO: 133978 - protein, 9 aa, Homo sapiens
PKQKKKKKK

SEQ ID NO: 133979 - protein, 9 aa, Homo sapiens
KQKKKKKKK

SEQ ID NO: 133980 - protein, 9 aa, Homo sapiens
QKKKKKKKD

SEQ ID NO: 133981 - protein, 9 aa, Homo sapiens
KKKKKKKDR

SEQ ID NO: 133982 - protein, 9 aa, Homo sapiens
KKKKKKDRG

SEQ ID NO: 133983 - protein, 9 aa, Homo sapiens
KKKKKDRGR

SEQ ID NO: 133984 - protein, 9 aa, Homo sapiens
KKKKDRGRR

SEQ ID NO: 133985 - protein, 9 aa, Homo sapiens
KKKDRGRRS

SEQ ID NO: 133986 - protein, 9 aa, Homo sapiens
KKDRGRRSE

SEQ ID NO: 133987 - protein, 9 aa, Homo sapiens
KDRGRRSES

SEQ ID NO: 133988 - protein, 9 aa, Homo sapiens
DRGRRSESS

SEQ ID NO: 133989 - protein, 9 aa, Homo sapiens
RGRRSESSS

SEQ ID NO: 133990 - protein, 9 aa, Homo sapiens
GRRSESSSP

SEQ ID NO: 133991 - protein, 9 aa, Homo sapiens
RRSESSSPR

SEQ ID NO: 133992 - protein, 9 aa, Homo sapiens
RSESSSPRR

SEQ ID NO: 133993 - protein, 9 aa, Homo sapiens
SESSSPRRE

SEQ ID NO: 133994 - protein, 9 aa, Homo sapiens
ESSSPRRER

SEQ ID NO: 133995 - protein, 9 aa, Homo sapiens
SSSPRRERK

SEQ ID NO: 133996 - protein, 9 aa, Homo sapiens
SSPRRERKK

SEQ ID NO: 133997 - protein, 9 aa, Homo sapiens
SPRRERKKS

SEQ ID NO: 133998 - protein, 9 aa, Homo sapiens
PRRERKKSS

SEQ ID NO: 133999 - protein, 9 aa, Homo sapiens
RRERKKSSK

SEQ ID NO: 134000 - protein, 9 aa, Homo sapiens
RERKKSSKK

SEQ ID NO: 134001 - protein, 9 aa, Homo sapiens
ERKKSSKKK

SEQ ID NO: 134002 - protein, 9 aa, Homo sapiens
RKKSSKKKK

SEQ ID NO: 134003 - protein, 9 aa, Homo sapiens
KKSSKKKKH

SEQ ID NO: 134004 - protein, 9 aa, Homo sapiens
KSSKKKKHR

SEQ ID NO: 134005 - protein, 9 aa, Homo sapiens
SSKKKKHRS

SEQ ID NO: 134006 - protein, 9 aa, Homo sapiens
SKKKKHRSE

SEQ ID NO: 134007 - protein, 9 aa, Homo sapiens
KKKKHRSES

SEQ ID NO: 134008 - protein, 9 aa, Homo sapiens
KKKHRSESE

SEQ ID NO: 134009 - protein, 9 aa, Homo sapiens
KKHRSESES

SEQ ID NO: 134010 - protein, 9 aa, Homo sapiens
KHRSESESK

SEQ ID NO: 134011 - protein, 9 aa, Homo sapiens
HRSESESKK

SEQ ID NO: 134012 - protein, 9 aa, Homo sapiens
RSESESKKR

SEQ ID NO: 134013 - protein, 9 aa, Homo sapiens
SESESKKRK

SEQ ID NO: 134014 - protein, 9 aa, Homo sapiens
ESESKKRKH

SEQ ID NO: 134015 - protein, 9 aa, Homo sapiens
SESKKRKHR

SEQ ID NO: 134016 - protein, 9 aa, Homo sapiens
ESKKRKHRS

SEQ ID NO: 134017 - protein, 9 aa, Homo sapiens
SKKRKHRSP

SEQ ID NO: 134018 - protein, 9 aa, Homo sapiens
KKRKHRSPT

SEQ ID NO: 134019 - protein, 9 aa, Homo sapiens
KRKHRSPTP

SEQ ID NO: 134020 - protein, 9 aa, Homo sapiens
RKHRSPTPK

SEQ ID NO: 134021 - protein, 9 aa, Homo sapiens
KHRSPTPKS

SEQ ID NO: 134022 - protein, 9 aa, Homo sapiens
HRSPTPKSK

SEQ ID NO: 134023 - protein, 9 aa, Homo sapiens
RSPTPKSKR

SEQ ID NO: 134024 - protein, 9 aa, Homo sapiens
SPTPKSKRK

SEQ ID NO: 134025 - protein, 9 aa, Homo sapiens
PTPKSKRKS

SEQ ID NO: 134026 - protein, 9 aa, Homo sapiens
TPKSKRKSK

SEQ ID NO: 134027 - protein, 9 aa, Homo sapiens
PKSKRKSKD

SEQ ID NO: 134028 - protein, 9 aa, Homo sapiens
KSKRKSKDK

SEQ ID NO: 134029 - protein, 9 aa, Homo sapiens
SKRKSKDKK

SEQ ID NO: 134030 - protein, 9 aa, Homo sapiens
KRKSKDKKR

SEQ ID NO: 134031 - protein, 9 aa, Homo sapiens
RKSKDKKRK

SEQ ID NO: 134032 - protein, 9 aa, Homo sapiens
KSKDKKRKR

SEQ ID NO: 134033 - protein, 9 aa, Homo sapiens
SKDKKRKRS

SEQ ID NO: 134034 - protein, 9 aa, Homo sapiens
KDKKRKRSR

SEQ ID NO: 134035 - protein, 9 aa, Homo sapiens
DKKRKRSRS

SEQ ID NO: 134036 - protein, 9 aa, Homo sapiens
KKRKRSRST

SEQ ID NO: 134037 - protein, 9 aa, Homo sapiens
KRKRSRSTT

SEQ ID NO: 134038 - protein, 9 aa, Homo sapiens
RKRSRSTTP

SEQ ID NO: 134039 - protein, 9 aa, Homo sapiens
KRSRSTTPA

SEQ ID NO: 134040 - protein, 9 aa, Homo sapiens
RSRSTTPAP

SEQ ID NO: 134041 - protein, 9 aa, Homo sapiens
SRSTTPAPK

SEQ ID NO: 134042 - protein, 9 aa, Homo sapiens
RSTTPAPKS

SEQ ID NO: 134043 - protein, 9 aa, Homo sapiens
STTPAPKSR

SEQ ID NO: 134044 - protein, 9 aa, Homo sapiens
TTPAPKSRR

SEQ ID NO: 134045 - protein, 9 aa, Homo sapiens
TPAPKSRRA

SEQ ID NO: 134046 - protein, 9 aa, Homo sapiens
PAPKSRRAH

SEQ ID NO: 134047 - protein, 9 aa, Homo sapiens
APKSRRAHR

SEQ ID NO: 134048 - protein, 9 aa, Homo sapiens
PKSRRAHRS

SEQ ID NO: 134049 - protein, 9 aa, Homo sapiens
KSRRAHRST

SEQ ID NO: 134050 - protein, 9 aa, Homo sapiens
SRRAHRSTS

SEQ ID NO: 134051 - protein, 9 aa, Homo sapiens
RRAHRSTSA

SEQ ID NO: 134052 - protein, 9 aa, Homo sapiens
RAHRSTSAD

SEQ ID NO: 134053 - protein, 9 aa, Homo sapiens
AHRSTSADS

SEQ ID NO: 134054 - protein, 9 aa, Homo sapiens
HRSTSADSA

SEQ ID NO: 134055 - protein, 9 aa, Homo sapiens
RSTSADSAS

SEQ ID NO: 134056 - protein, 9 aa, Homo sapiens
STSADSASS

SEQ ID NO: 134057 - protein, 9 aa, Homo sapiens
TSADSASSS

SEQ ID NO: 134058 - protein, 9 aa, Homo sapiens
SADSASSSD

SEQ ID NO: 134059 - protein, 9 aa, Homo sapiens
ADSASSSDT

SEQ ID NO: 134060 - protein, 9 aa, Homo sapiens
DSASSSDTS

SEQ ID NO: 134061 - protein, 9 aa, Homo sapiens
SASSSDTSR

SEQ ID NO: 134062 - protein, 9 aa, Homo sapiens
ASSSDTSRS

SEQ ID NO: 134063 - protein, 9 aa, Homo sapiens
SSSDTSRSR

SEQ ID NO: 134064 - protein, 9 aa, Homo sapiens
SSDTSRSRS

SEQ ID NO: 134065 - protein, 9 aa, Homo sapiens
SDTSRSRSR

SEQ ID NO: 134066 - protein, 9 aa, Homo sapiens
DTSRSRSRS

SEQ ID NO: 134067 - protein, 9 aa, Homo sapiens
TSRSRSRSA

SEQ ID NO: 134068 - protein, 9 aa, Homo sapiens
SRSRSRSAA

SEQ ID NO: 134069 - protein, 9 aa, Homo sapiens
RSRSRSAAA

SEQ ID NO: 134070 - protein, 9 aa, Homo sapiens
SRSRSAAAK

SEQ ID NO: 134071 - protein, 9 aa, Homo sapiens
RSRSAAAKT

SEQ ID NO: 134072 - protein, 9 aa, Homo sapiens
SRSAAAKTH

SEQ ID NO: 134073 - protein, 9 aa, Homo sapiens
RSAAAKTHT

SEQ ID NO: 134074 - protein, 9 aa, Homo sapiens
SAAAKTHTT

SEQ ID NO: 134075 - protein, 9 aa, Homo sapiens
AAAKTHTTA

SEQ ID NO: 134076 - protein, 9 aa, Homo sapiens
AAKTHTTAL

SEQ ID NO: 134077 - protein, 9 aa, Homo sapiens
AKTHTTALA

SEQ ID NO: 134078 - protein, 9 aa, Homo sapiens
KTHTTALAG

SEQ ID NO: 134079 - protein, 9 aa, Homo sapiens
THTTALAGR

SEQ ID NO: 134080 - protein, 9 aa, Homo sapiens
HTTALAGRS

SEQ ID NO: 134081 - protein, 9 aa, Homo sapiens
TTALAGRSP

SEQ ID NO: 134082 - protein, 9 aa, Homo sapiens
TALAGRSPS

SEQ ID NO: 134083 - protein, 9 aa, Homo sapiens
ALAGRSPSP

SEQ ID NO: 134084 - protein, 9 aa, Homo sapiens
LAGRSPSPA

SEQ ID NO: 134085 - protein, 9 aa, Homo sapiens
AGRSPSPAS

SEQ ID NO: 134086 - protein, 9 aa, Homo sapiens
GRSPSPASG

SEQ ID NO: 134087 - protein, 9 aa, Homo sapiens
RSPSPASGR

SEQ ID NO: 134088 - protein, 9 aa, Homo sapiens
SPSPASGRR

SEQ ID NO: 134089 - protein, 9 aa, Homo sapiens
PSPASGRRG

SEQ ID NO: 134090 - protein, 9 aa, Homo sapiens
SPASGRRGE

SEQ ID NO: 134091 - protein, 9 aa, Homo sapiens
PASGRRGEG

SEQ ID NO: 134092 - protein, 9 aa, Homo sapiens
ASGRRGEGD

SEQ ID NO: 134093 - protein, 9 aa, Homo sapiens
SGRRGEGDA

SEQ ID NO: 134094 - protein, 9 aa, Homo sapiens
GRRGEGDAP

SEQ ID NO: 134095 - protein, 9 aa, Homo sapiens
RRGEGDAPF

SEQ ID NO: 134096 - protein, 9 aa, Homo sapiens
RGEGDAPFS

SEQ ID NO: 134097 - protein, 9 aa, Homo sapiens
GEGDAPFSE

SEQ ID NO: 134098 - protein, 9 aa, Homo sapiens
EGDAPFSEP

SEQ ID NO: 134099 - protein, 9 aa, Homo sapiens
GDAPFSEPG

SEQ ID NO: 134100 - protein, 9 aa, Homo sapiens
DAPFSEPGT

SEQ ID NO: 134101 - protein, 9 aa, Homo sapiens
APFSEPGTT

SEQ ID NO: 134102 - protein, 9 aa, Homo sapiens
PFSEPGTTS

SEQ ID NO: 134103 - protein, 9 aa, Homo sapiens
FSEPGTTST

SEQ ID NO: 134104 - protein, 9 aa, Homo sapiens
SEPGTTSTQ

SEQ ID NO: 134105 - protein, 9 aa, Homo sapiens
EPGTTSTQR

SEQ ID NO: 134106 - protein, 9 aa, Homo sapiens
PGTTSTQRP

SEQ ID NO: 134107 - protein, 9 aa, Homo sapiens
GTTSTQRPS

SEQ ID NO: 134108 - protein, 9 aa, Homo sapiens
TTSTQRPSS

SEQ ID NO: 134109 - protein, 9 aa, Homo sapiens
TSTQRPSSP

SEQ ID NO: 134110 - protein, 9 aa, Homo sapiens
STQRPSSPE

SEQ ID NO: 134111 - protein, 9 aa, Homo sapiens
TQRPSSPET

SEQ ID NO: 134112 - protein, 9 aa, Homo sapiens
QRPSSPETA

SEQ ID NO: 134113 - protein, 9 aa, Homo sapiens
RPSSPETAT

SEQ ID NO: 134114 - protein, 9 aa, Homo sapiens
PSSPETATK

SEQ ID NO: 134115 - protein, 9 aa, Homo sapiens
SSPETATKQ

SEQ ID NO: 134116 - protein, 9 aa, Homo sapiens
SPETATKQP

SEQ ID NO: 134117 - protein, 9 aa, Homo sapiens
PETATKQPS

SEQ ID NO: 134118 - protein, 9 aa, Homo sapiens
ETATKQPSS

SEQ ID NO: 134119 - protein, 9 aa, Homo sapiens
TATKQPSSP

SEQ ID NO: 134120 - protein, 9 aa, Homo sapiens
ATKQPSSPY

SEQ ID NO: 134121 - protein, 9 aa, Homo sapiens
TKQPSSPYE

SEQ ID NO: 134122 - protein, 9 aa, Homo sapiens
KQPSSPYED

SEQ ID NO: 134123 - protein, 9 aa, Homo sapiens
QPSSPYEDK

SEQ ID NO: 134124 - protein, 9 aa, Homo sapiens
PSSPYEDKD

SEQ ID NO: 134125 - protein, 9 aa, Homo sapiens
SSPYEDKDK

SEQ ID NO: 134126 - protein, 9 aa, Homo sapiens
SPYEDKDKD

SEQ ID NO: 134127 - protein, 9 aa, Homo sapiens
PYEDKDKDK

SEQ ID NO: 134128 - protein, 9 aa, Homo sapiens
YEDKDKDKK

SEQ ID NO: 134129 - protein, 9 aa, Homo sapiens
EDKDKDKKE

SEQ ID NO: 134130 - protein, 9 aa, Homo sapiens
DKDKDKKEK

SEQ ID NO: 134131 - protein, 9 aa, Homo sapiens
KDKDKKEKS

SEQ ID NO: 134132 - protein, 9 aa, Homo sapiens
DKDKKEKSA

SEQ ID NO: 134133 - protein, 9 aa, Homo sapiens
KDKKEKSAT

SEQ ID NO: 134134 - protein, 9 aa, Homo sapiens
DKKEKSATR

SEQ ID NO: 134135 - protein, 9 aa, Homo sapiens
KKEKSATRP

SEQ ID NO: 134136 - protein, 9 aa, Homo sapiens
KEKSATRPS

SEQ ID NO: 134137 - protein, 9 aa, Homo sapiens
EKSATRPSP

SEQ ID NO: 134138 - protein, 9 aa, Homo sapiens
KSATRPSPS

SEQ ID NO: 134139 - protein, 9 aa, Homo sapiens
SATRPSPSP

SEQ ID NO: 134140 - protein, 9 aa, Homo sapiens
ATRPSPSPE

SEQ ID NO: 134141 - protein, 9 aa, Homo sapiens
TRPSPSPER

SEQ ID NO: 134142 - protein, 9 aa, Homo sapiens
RPSPSPERS

SEQ ID NO: 134143 - protein, 9 aa, Homo sapiens
PSPSPERSS

SEQ ID NO: 134144 - protein, 9 aa, Homo sapiens
SPSPERSST

SEQ ID NO: 134145 - protein, 9 aa, Homo sapiens
PSPERSSTG

SEQ ID NO: 134146 - protein, 9 aa, Homo sapiens
SPERSSTGP

SEQ ID NO: 134147 - protein, 9 aa, Homo sapiens
PERSSTGPE

SEQ ID NO: 134148 - protein, 9 aa, Homo sapiens
ERSSTGPEP

SEQ ID NO: 134149 - protein, 9 aa, Homo sapiens
RSSTGPEPP

SEQ ID NO: 134150 - protein, 9 aa, Homo sapiens
SSTGPEPPA

SEQ ID NO: 134151 - protein, 9 aa, Homo sapiens
STGPEPPAP

SEQ ID NO: 134152 - protein, 9 aa, Homo sapiens
TGPEPPAPT

SEQ ID NO: 134153 - protein, 9 aa, Homo sapiens
GPEPPAPTP

SEQ ID NO: 134154 - protein, 9 aa, Homo sapiens
PEPPAPTPL

SEQ ID NO: 134155 - protein, 9 aa, Homo sapiens
EPPAPTPLL

SEQ ID NO: 134156 - protein, 9 aa, Homo sapiens
PPAPTPLLA

SEQ ID NO: 134157 - protein, 9 aa, Homo sapiens
PAPTPLLAE

SEQ ID NO: 134158 - protein, 9 aa, Homo sapiens
APTPLLAER

SEQ ID NO: 134159 - protein, 9 aa, Homo sapiens
PTPLLAERH

SEQ ID NO: 134160 - protein, 9 aa, Homo sapiens
TPLLAERHG

SEQ ID NO: 134161 - protein, 9 aa, Homo sapiens
PLLAERHGG

SEQ ID NO: 134162 - protein, 9 aa, Homo sapiens
LLAERHGGS

SEQ ID NO: 134163 - protein, 9 aa, Homo sapiens
LAERHGGSP

SEQ ID NO: 134164 - protein, 9 aa, Homo sapiens
AERHGGSPQ

SEQ ID NO: 134165 - protein, 9 aa, Homo sapiens
ERHGGSPQP

SEQ ID NO: 134166 - protein, 9 aa, Homo sapiens
RHGGSPQPL

SEQ ID NO: 134167 - protein, 9 aa, Homo sapiens
HGGSPQPLA

SEQ ID NO: 134168 - protein, 9 aa, Homo sapiens
GGSPQPLAT

SEQ ID NO: 134169 - protein, 9 aa, Homo sapiens
GSPQPLATT

SEQ ID NO: 134170 - protein, 9 aa, Homo sapiens
SPQPLATTP

SEQ ID NO: 134171 - protein, 9 aa, Homo sapiens
PQPLATTPL

SEQ ID NO: 134172 - protein, 9 aa, Homo sapiens
QPLATTPLS

SEQ ID NO: 134173 - protein, 9 aa, Homo sapiens
PLATTPLSQ

SEQ ID NO: 134174 - protein, 9 aa, Homo sapiens
LATTPLSQE

SEQ ID NO: 134175 - protein, 9 aa, Homo sapiens
ATTPLSQEP

SEQ ID NO: 134176 - protein, 9 aa, Homo sapiens
TTPLSQEPV

SEQ ID NO: 134177 - protein, 9 aa, Homo sapiens
TPLSQEPVN

SEQ ID NO: 134178 - protein, 9 aa, Homo sapiens
PLSQEPVNP

SEQ ID NO: 134179 - protein, 9 aa, Homo sapiens
LSQEPVNPP

SEQ ID NO: 134180 - protein, 9 aa, Homo sapiens
SQEPVNPPS

SEQ ID NO: 134181 - protein, 9 aa, Homo sapiens
QEPVNPPSE

SEQ ID NO: 134182 - protein, 9 aa, Homo sapiens
EPVNPPSEA

SEQ ID NO: 134183 - protein, 9 aa, Homo sapiens
PVNPPSEAS

SEQ ID NO: 134184 - protein, 9 aa, Homo sapiens
VNPPSEASP

SEQ ID NO: 134185 - protein, 9 aa, Homo sapiens
NPPSEASPT

SEQ ID NO: 134186 - protein, 9 aa, Homo sapiens
PPSEASPTR

SEQ ID NO: 134187 - protein, 9 aa, Homo sapiens
PSEASPTRD

SEQ ID NO: 134188 - protein, 9 aa, Homo sapiens
SEASPTRDR

SEQ ID NO: 134189 - protein, 9 aa, Homo sapiens
EASPTRDRS

SEQ ID NO: 134190 - protein, 9 aa, Homo sapiens
ASPTRDRSP

SEQ ID NO: 134191 - protein, 9 aa, Homo sapiens
SPTRDRSPP

SEQ ID NO: 134192 - protein, 9 aa, Homo sapiens
PTRDRSPPK

SEQ ID NO: 134193 - protein, 9 aa, Homo sapiens
TRDRSPPKS

SEQ ID NO: 134194 - protein, 9 aa, Homo sapiens
RDRSPPKSP

SEQ ID NO: 134195 - protein, 9 aa, Homo sapiens
DRSPPKSPE

SEQ ID NO: 134196 - protein, 9 aa, Homo sapiens
RSPPKSPEK

SEQ ID NO: 134197 - protein, 9 aa, Homo sapiens
SPPKSPEKL

SEQ ID NO: 134198 - protein, 9 aa, Homo sapiens
PPKSPEKLP

SEQ ID NO: 134199 - protein, 9 aa, Homo sapiens
PKSPEKLPQ

SEQ ID NO: 134200 - protein, 9 aa, Homo sapiens
KSPEKLPQS

SEQ ID NO: 134201 - protein, 9 aa, Homo sapiens
SPEKLPQSS

SEQ ID NO: 134202 - protein, 9 aa, Homo sapiens
PEKLPQSSS

SEQ ID NO: 134203 - protein, 9 aa, Homo sapiens
EKLPQSSSS

SEQ ID NO: 134204 - protein, 9 aa, Homo sapiens
KLPQSSSSE

SEQ ID NO: 134205 - protein, 9 aa, Homo sapiens
LPQSSSSES

SEQ ID NO: 134206 - protein, 9 aa, Homo sapiens
PQSSSSESS

SEQ ID NO: 134207 - protein, 9 aa, Homo sapiens
QSSSSESSP

SEQ ID NO: 134208 - protein, 9 aa, Homo sapiens
SSSSESSPP

SEQ ID NO: 134209 - protein, 9 aa, Homo sapiens
SSSESSPPS

SEQ ID NO: 134210 - protein, 9 aa, Homo sapiens
SSESSPPSP

SEQ ID NO: 134211 - protein, 9 aa, Homo sapiens
SESSPPSPQ

SEQ ID NO: 134212 - protein, 9 aa, Homo sapiens
ESSPPSPQP

SEQ ID NO: 134213 - protein, 9 aa, Homo sapiens
SSPPSPQPT

SEQ ID NO: 134214 - protein, 9 aa, Homo sapiens
SPPSPQPTK

SEQ ID NO: 134215 - protein, 9 aa, Homo sapiens
PPSPQPTKV

SEQ ID NO: 134216 - protein, 9 aa, Homo sapiens
PSPQPTKVS

SEQ ID NO: 134217 - protein, 9 aa, Homo sapiens
SPQPTKVSR

SEQ ID NO: 134218 - protein, 9 aa, Homo sapiens
PQPTKVSRH

SEQ ID NO: 134219 - protein, 9 aa, Homo sapiens
QPTKVSRHA

SEQ ID NO: 134220 - protein, 9 aa, Homo sapiens
PTKVSRHAS

SEQ ID NO: 134221 - protein, 9 aa, Homo sapiens
TKVSRHASS

SEQ ID NO: 134222 - protein, 9 aa, Homo sapiens
KVSRHASSS

SEQ ID NO: 134223 - protein, 9 aa, Homo sapiens
VSRHASSSP

SEQ ID NO: 134224 - protein, 9 aa, Homo sapiens
SRHASSSPE

SEQ ID NO: 134225 - protein, 9 aa, Homo sapiens
RHASSSPES

SEQ ID NO: 134226 - protein, 9 aa, Homo sapiens
HASSSPESP

SEQ ID NO: 134227 - protein, 9 aa, Homo sapiens
ASSSPESPK

SEQ ID NO: 134228 - protein, 9 aa, Homo sapiens
SSSPESPKP

SEQ ID NO: 134229 - protein, 9 aa, Homo sapiens
SSPESPKPA

SEQ ID NO: 134230 - protein, 9 aa, Homo sapiens
SPESPKPAP

SEQ ID NO: 134231 - protein, 9 aa, Homo sapiens
PESPKPAPA

SEQ ID NO: 134232 - protein, 9 aa, Homo sapiens
ESPKPAPAP

SEQ ID NO: 134233 - protein, 9 aa, Homo sapiens
SPKPAPAPG

SEQ ID NO: 134234 - protein, 9 aa, Homo sapiens
PKPAPAPGS

SEQ ID NO: 134235 - protein, 9 aa, Homo sapiens
KPAPAPGSH

SEQ ID NO: 134236 - protein, 9 aa, Homo sapiens
PAPAPGSHR

SEQ ID NO: 134237 - protein, 9 aa, Homo sapiens
APAPGSHRE

SEQ ID NO: 134238 - protein, 9 aa, Homo sapiens
PAPGSHREI

SEQ ID NO: 134239 - protein, 9 aa, Homo sapiens
APGSHREIS

SEQ ID NO: 134240 - protein, 9 aa, Homo sapiens
PGSHREISS

SEQ ID NO: 134241 - protein, 9 aa, Homo sapiens
GSHREISSS

SEQ ID NO: 134242 - protein, 9 aa, Homo sapiens
SHREISSSP

SEQ ID NO: 134243 - protein, 9 aa, Homo sapiens
HREISSSPT

SEQ ID NO: 134244 - protein, 9 aa, Homo sapiens
REISSSPTS

SEQ ID NO: 134245 - protein, 9 aa, Homo sapiens
EISSSPTSK

SEQ ID NO: 134246 - protein, 9 aa, Homo sapiens
ISSSPTSKN

SEQ ID NO: 134247 - protein, 9 aa, Homo sapiens
SSSPTSKNR

SEQ ID NO: 134248 - protein, 9 aa, Homo sapiens
SSPTSKNRS

SEQ ID NO: 134249 - protein, 9 aa, Homo sapiens
SPTSKNRSH

SEQ ID NO: 134250 - protein, 9 aa, Homo sapiens
PTSKNRSHG

SEQ ID NO: 134251 - protein, 9 aa, Homo sapiens
TSKNRSHGR

SEQ ID NO: 134252 - protein, 9 aa, Homo sapiens
SKNRSHGRA

SEQ ID NO: 134253 - protein, 9 aa, Homo sapiens
KNRSHGRAK

SEQ ID NO: 134254 - protein, 9 aa, Homo sapiens
NRSHGRAKR

SEQ ID NO: 134255 - protein, 9 aa, Homo sapiens
RSHGRAKRD

SEQ ID NO: 134256 - protein, 9 aa, Homo sapiens
SHGRAKRDK

SEQ ID NO: 134257 - protein, 9 aa, Homo sapiens
HGRAKRDKS

SEQ ID NO: 134258 - protein, 9 aa, Homo sapiens
GRAKRDKSH

SEQ ID NO: 134259 - protein, 9 aa, Homo sapiens
RAKRDKSHS

SEQ ID NO: 134260 - protein, 9 aa, Homo sapiens
AKRDKSHSH

SEQ ID NO: 134261 - protein, 9 aa, Homo sapiens
KRDKSHSHT

SEQ ID NO: 134262 - protein, 9 aa, Homo sapiens
RDKSHSHTP

SEQ ID NO: 134263 - protein, 9 aa, Homo sapiens
DKSHSHTPS

SEQ ID NO: 134264 - protein, 9 aa, Homo sapiens
KSHSHTPSR

SEQ ID NO: 134265 - protein, 9 aa, Homo sapiens
SHSHTPSRR

SEQ ID NO: 134266 - protein, 9 aa, Homo sapiens
HSHTPSRRM

SEQ ID NO: 134267 - protein, 9 aa, Homo sapiens
SHTPSRRMG

SEQ ID NO: 134268 - protein, 9 aa, Homo sapiens
HTPSRRMGR

SEQ ID NO: 134269 - protein, 9 aa, Homo sapiens
TPSRRMGRS

SEQ ID NO: 134270 - protein, 9 aa, Homo sapiens
PSRRMGRSR

SEQ ID NO: 134271 - protein, 9 aa, Homo sapiens
SRRMGRSRS

SEQ ID NO: 134272 - protein, 9 aa, Homo sapiens
RRMGRSRSP

SEQ ID NO: 134273 - protein, 9 aa, Homo sapiens
RMGRSRSPA

SEQ ID NO: 134274 - protein, 9 aa, Homo sapiens
MGRSRSPAT

SEQ ID NO: 134275 - protein, 9 aa, Homo sapiens
GRSRSPATA

SEQ ID NO: 134276 - protein, 9 aa, Homo sapiens
RSRSPATAK

SEQ ID NO: 134277 - protein, 9 aa, Homo sapiens
SRSPATAKR

SEQ ID NO: 134278 - protein, 9 aa, Homo sapiens
RSPATAKRG

SEQ ID NO: 134279 - protein, 9 aa, Homo sapiens
SPATAKRGR

SEQ ID NO: 134280 - protein, 9 aa, Homo sapiens
PATAKRGRS

SEQ ID NO: 134281 - protein, 9 aa, Homo sapiens
ATAKRGRSR

SEQ ID NO: 134282 - protein, 9 aa, Homo sapiens
TAKRGRSRS

SEQ ID NO: 134283 - protein, 9 aa, Homo sapiens
AKRGRSRSR

SEQ ID NO: 134284 - protein, 9 aa, Homo sapiens
KRGRSRSRT

SEQ ID NO: 134285 - protein, 9 aa, Homo sapiens
RGRSRSRTP

SEQ ID NO: 134286 - protein, 9 aa, Homo sapiens
GRSRSRTPT

SEQ ID NO: 134287 - protein, 9 aa, Homo sapiens
RSRSRTPTK

SEQ ID NO: 134288 - protein, 9 aa, Homo sapiens
SRSRTPTKR

SEQ ID NO: 134289 - protein, 9 aa, Homo sapiens
RSRTPTKRG

SEQ ID NO: 134290 - protein, 9 aa, Homo sapiens
SRTPTKRGH

SEQ ID NO: 134291 - protein, 9 aa, Homo sapiens
RTPTKRGHS

SEQ ID NO: 134292 - protein, 9 aa, Homo sapiens
TPTKRGHSR

SEQ ID NO: 134293 - protein, 9 aa, Homo sapiens
PTKRGHSRS

SEQ ID NO: 134294 - protein, 9 aa, Homo sapiens
TKRGHSRSR

SEQ ID NO: 134295 - protein, 9 aa, Homo sapiens
KRGHSRSRS

SEQ ID NO: 134296 - protein, 9 aa, Homo sapiens
RGHSRSRSP

SEQ ID NO: 134297 - protein, 9 aa, Homo sapiens
GHSRSRSPQ

SEQ ID NO: 134298 - protein, 9 aa, Homo sapiens
HSRSRSPQW

SEQ ID NO: 134299 - protein, 9 aa, Homo sapiens
SRSRSPQWR

SEQ ID NO: 134300 - protein, 9 aa, Homo sapiens
RSRSPQWRR

SEQ ID NO: 134301 - protein, 9 aa, Homo sapiens
SRSPQWRRS

SEQ ID NO: 134302 - protein, 9 aa, Homo sapiens
RSPQWRRSR

SEQ ID NO: 134303 - protein, 9 aa, Homo sapiens
SPQWRRSRS

SEQ ID NO: 134304 - protein, 9 aa, Homo sapiens
PQWRRSRSA

SEQ ID NO: 134305 - protein, 9 aa, Homo sapiens
QWRRSRSAQ

SEQ ID NO: 134306 - protein, 9 aa, Homo sapiens
WRRSRSAQR

SEQ ID NO: 134307 - protein, 9 aa, Homo sapiens
RRSRSAQRW

SEQ ID NO: 134308 - protein, 9 aa, Homo sapiens
RSRSAQRWG

SEQ ID NO: 134309 - protein, 9 aa, Homo sapiens
SRSAQRWGR

SEQ ID NO: 134310 - protein, 9 aa, Homo sapiens
RSAQRWGRS

SEQ ID NO: 134311 - protein, 9 aa, Homo sapiens
SAQRWGRSR

SEQ ID NO: 134312 - protein, 9 aa, Homo sapiens
AQRWGRSRS

SEQ ID NO: 134313 - protein, 9 aa, Homo sapiens
QRWGRSRSP

SEQ ID NO: 134314 - protein, 9 aa, Homo sapiens
RWGRSRSPQ

SEQ ID NO: 134315 - protein, 9 aa, Homo sapiens
WGRSRSPQR

SEQ ID NO: 134316 - protein, 9 aa, Homo sapiens
GRSRSPQRR

SEQ ID NO: 134317 - protein, 9 aa, Homo sapiens
RSRSPQRRG

SEQ ID NO: 134318 - protein, 9 aa, Homo sapiens
SRSPQRRGR

SEQ ID NO: 134319 - protein, 9 aa, Homo sapiens
RSPQRRGRS

SEQ ID NO: 134320 - protein, 9 aa, Homo sapiens
SPQRRGRSR

SEQ ID NO: 134321 - protein, 9 aa, Homo sapiens
PQRRGRSRS

SEQ ID NO: 134322 - protein, 9 aa, Homo sapiens
QRRGRSRSP

SEQ ID NO: 134323 - protein, 9 aa, Homo sapiens
RRGRSRSPQ

SEQ ID NO: 134324 - protein, 9 aa, Homo sapiens
RGRSRSPQR

SEQ ID NO: 134325 - protein, 9 aa, Homo sapiens
GRSRSPQRP

SEQ ID NO: 134326 - protein, 9 aa, Homo sapiens
RSRSPQRPG

SEQ ID NO: 134327 - protein, 9 aa, Homo sapiens
SRSPQRPGW

SEQ ID NO: 134328 - protein, 9 aa, Homo sapiens
RSPQRPGWS

SEQ ID NO: 134329 - protein, 9 aa, Homo sapiens
SPQRPGWSR

SEQ ID NO: 134330 - protein, 9 aa, Homo sapiens
PQRPGWSRS

SEQ ID NO: 134331 - protein, 9 aa, Homo sapiens
QRPGWSRSR

SEQ ID NO: 134332 - protein, 9 aa, Homo sapiens
RPGWSRSRN

SEQ ID NO: 134333 - protein, 9 aa, Homo sapiens
PGWSRSRNT

SEQ ID NO: 134334 - protein, 9 aa, Homo sapiens
GWSRSRNTQ

SEQ ID NO: 134335 - protein, 9 aa, Homo sapiens
WSRSRNTQR

SEQ ID NO: 134336 - protein, 9 aa, Homo sapiens
SRSRNTQRR

SEQ ID NO: 134337 - protein, 9 aa, Homo sapiens
RSRNTQRRG

SEQ ID NO: 134338 - protein, 9 aa, Homo sapiens
SRNTQRRGR

SEQ ID NO: 134339 - protein, 9 aa, Homo sapiens
RNTQRRGRS

SEQ ID NO: 134340 - protein, 9 aa, Homo sapiens
NTQRRGRSR

SEQ ID NO: 134341 - protein, 9 aa, Homo sapiens
TQRRGRSRS

SEQ ID NO: 134342 - protein, 9 aa, Homo sapiens
QRRGRSRSA

SEQ ID NO: 134343 - protein, 9 aa, Homo sapiens
RRGRSRSAR

SEQ ID NO: 134344 - protein, 9 aa, Homo sapiens
RGRSRSARR

SEQ ID NO: 134345 - protein, 9 aa, Homo sapiens
GRSRSARRG

SEQ ID NO: 134346 - protein, 9 aa, Homo sapiens
RSRSARRGR

SEQ ID NO: 134347 - protein, 9 aa, Homo sapiens
SRSARRGRS

SEQ ID NO: 134348 - protein, 9 aa, Homo sapiens
RSARRGRSH

SEQ ID NO: 134349 - protein, 9 aa, Homo sapiens
SARRGRSHS

SEQ ID NO: 134350 - protein, 9 aa, Homo sapiens
ARRGRSHSR

SEQ ID NO: 134351 - protein, 9 aa, Homo sapiens
RRGRSHSRS

SEQ ID NO: 134352 - protein, 9 aa, Homo sapiens
RGRSHSRSP

SEQ ID NO: 134353 - protein, 9 aa, Homo sapiens
GRSHSRSPA

SEQ ID NO: 134354 - protein, 9 aa, Homo sapiens
RSHSRSPAT

SEQ ID NO: 134355 - protein, 9 aa, Homo sapiens
SHSRSPATR

SEQ ID NO: 134356 - protein, 9 aa, Homo sapiens
HSRSPATRG

SEQ ID NO: 134357 - protein, 9 aa, Homo sapiens
SRSPATRGR

SEQ ID NO: 134358 - protein, 9 aa, Homo sapiens
RSPATRGRS

SEQ ID NO: 134359 - protein, 9 aa, Homo sapiens
SPATRGRSR

SEQ ID NO: 134360 - protein, 9 aa, Homo sapiens
PATRGRSRS

SEQ ID NO: 134361 - protein, 9 aa, Homo sapiens
ATRGRSRSR

SEQ ID NO: 134362 - protein, 9 aa, Homo sapiens
TRGRSRSRT

SEQ ID NO: 134363 - protein, 9 aa, Homo sapiens
RGRSRSRTP

SEQ ID NO: 134364 - protein, 9 aa, Homo sapiens
GRSRSRTPA

SEQ ID NO: 134365 - protein, 9 aa, Homo sapiens
RSRSRTPAR

SEQ ID NO: 134366 - protein, 9 aa, Homo sapiens
SRSRTPARR

SEQ ID NO: 134367 - protein, 9 aa, Homo sapiens
RSRTPARRG

SEQ ID NO: 134368 - protein, 9 aa, Homo sapiens
SRTPARRGR

SEQ ID NO: 134369 - protein, 9 aa, Homo sapiens
RTPARRGRS

SEQ ID NO: 134370 - protein, 9 aa, Homo sapiens
TPARRGRSR

SEQ ID NO: 134371 - protein, 9 aa, Homo sapiens
PARRGRSRS

SEQ ID NO: 134372 - protein, 9 aa, Homo sapiens
ARRGRSRSR

SEQ ID NO: 134373 - protein, 9 aa, Homo sapiens
RRGRSRSRT

SEQ ID NO: 134374 - protein, 9 aa, Homo sapiens
RGRSRSRTP

SEQ ID NO: 134375 - protein, 9 aa, Homo sapiens
GRSRSRTPA

SEQ ID NO: 134376 - protein, 9 aa, Homo sapiens
RSRSRTPAR

SEQ ID NO: 134377 - protein, 9 aa, Homo sapiens
SRSRTPARR

SEQ ID NO: 134378 - protein, 9 aa, Homo sapiens
RSRTPARRR

SEQ ID NO: 134379 - protein, 9 aa, Homo sapiens
SRTPARRRS

SEQ ID NO: 134380 - protein, 9 aa, Homo sapiens
RTPARRRSR

SEQ ID NO: 134381 - protein, 9 aa, Homo sapiens
TPARRRSRS

SEQ ID NO: 134382 - protein, 9 aa, Homo sapiens
PARRRSRSR

SEQ ID NO: 134383 - protein, 9 aa, Homo sapiens
ARRRSRSRT

SEQ ID NO: 134384 - protein, 9 aa, Homo sapiens
RRRSRSRTP

SEQ ID NO: 134385 - protein, 9 aa, Homo sapiens
RRSRSRTPT

SEQ ID NO: 134386 - protein, 9 aa, Homo sapiens
RSRSRTPTR

SEQ ID NO: 134387 - protein, 9 aa, Homo sapiens
SRSRTPTRR

SEQ ID NO: 134388 - protein, 9 aa, Homo sapiens
RSRTPTRRR

SEQ ID NO: 134389 - protein, 9 aa, Homo sapiens
SRTPTRRRS

SEQ ID NO: 134390 - protein, 9 aa, Homo sapiens
RTPTRRRSR

SEQ ID NO: 134391 - protein, 9 aa, Homo sapiens
TPTRRRSRS

SEQ ID NO: 134392 - protein, 9 aa, Homo sapiens
PTRRRSRSR

SEQ ID NO: 134393 - protein, 9 aa, Homo sapiens
TRRRSRSRT

SEQ ID NO: 134394 - protein, 9 aa, Homo sapiens
RRRSRSRTP

SEQ ID NO: 134395 - protein, 9 aa, Homo sapiens
RRSRSRTPA

SEQ ID NO: 134396 - protein, 9 aa, Homo sapiens
RSRSRTPAR

SEQ ID NO: 134397 - protein, 9 aa, Homo sapiens
SRSRTPARR

SEQ ID NO: 134398 - protein, 9 aa, Homo sapiens
RSRTPARRG

SEQ ID NO: 134399 - protein, 9 aa, Homo sapiens
SRTPARRGR

SEQ ID NO: 134400 - protein, 9 aa, Homo sapiens
RTPARRGRS

SEQ ID NO: 134401 - protein, 9 aa, Homo sapiens
TPARRGRSR

SEQ ID NO: 134402 - protein, 9 aa, Homo sapiens
PARRGRSRS

SEQ ID NO: 134403 - protein, 9 aa, Homo sapiens
ARRGRSRSR

SEQ ID NO: 134404 - protein, 9 aa, Homo sapiens
RRGRSRSRT

SEQ ID NO: 134405 - protein, 9 aa, Homo sapiens
RGRSRSRTP

SEQ ID NO: 134406 - protein, 9 aa, Homo sapiens
GRSRSRTPA

SEQ ID NO: 134407 - protein, 9 aa, Homo sapiens
RSRSRTPAR

SEQ ID NO: 134408 - protein, 9 aa, Homo sapiens
SRSRTPARR

SEQ ID NO: 134409 - protein, 9 aa, Homo sapiens
RSRTPARRR

SEQ ID NO: 134410 - protein, 9 aa, Homo sapiens
SRTPARRRS

SEQ ID NO: 134411 - protein, 9 aa, Homo sapiens
RTPARRRSR

SEQ ID NO: 134412 - protein, 9 aa, Homo sapiens
TPARRRSRT

SEQ ID NO: 134413 - protein, 9 aa, Homo sapiens
PARRRSRTR

SEQ ID NO: 134414 - protein, 9 aa, Homo sapiens
ARRRSRTRS

SEQ ID NO: 134415 - protein, 9 aa, Homo sapiens
RRRSRTRSP

SEQ ID NO: 134416 - protein, 9 aa, Homo sapiens
RRSRTRSPV

SEQ ID NO: 134417 - protein, 9 aa, Homo sapiens
RSRTRSPVR

SEQ ID NO: 134418 - protein, 9 aa, Homo sapiens
SRTRSPVRR

SEQ ID NO: 134419 - protein, 9 aa, Homo sapiens
RTRSPVRRR

SEQ ID NO: 134420 - protein, 9 aa, Homo sapiens
TRSPVRRRS

SEQ ID NO: 134421 - protein, 9 aa, Homo sapiens
RSPVRRRSR

SEQ ID NO: 134422 - protein, 9 aa, Homo sapiens
SPVRRRSRS

SEQ ID NO: 134423 - protein, 9 aa, Homo sapiens
PVRRRSRSR

SEQ ID NO: 134424 - protein, 9 aa, Homo sapiens
VRRRSRSRS

SEQ ID NO: 134425 - protein, 9 aa, Homo sapiens
RRRSRSRSP

SEQ ID NO: 134426 - protein, 9 aa, Homo sapiens
RRSRSRSPA

SEQ ID NO: 134427 - protein, 9 aa, Homo sapiens
RSRSRSPAR

SEQ ID NO: 134428 - protein, 9 aa, Homo sapiens
SRSRSPARR

SEQ ID NO: 134429 - protein, 9 aa, Homo sapiens
RSRSPARRS

SEQ ID NO: 134430 - protein, 9 aa, Homo sapiens
SRSPARRSG

SEQ ID NO: 134431 - protein, 9 aa, Homo sapiens
RSPARRSGR

SEQ ID NO: 134432 - protein, 9 aa, Homo sapiens
SPARRSGRS

SEQ ID NO: 134433 - protein, 9 aa, Homo sapiens
PARRSGRSR

SEQ ID NO: 134434 - protein, 9 aa, Homo sapiens
ARRSGRSRS

SEQ ID NO: 134435 - protein, 9 aa, Homo sapiens
RRSGRSRSR

SEQ ID NO: 134436 - protein, 9 aa, Homo sapiens
RSGRSRSRT

SEQ ID NO: 134437 - protein, 9 aa, Homo sapiens
SGRSRSRTP

SEQ ID NO: 134438 - protein, 9 aa, Homo sapiens
GRSRSRTPA

SEQ ID NO: 134439 - protein, 9 aa, Homo sapiens
RSRSRTPAR

SEQ ID NO: 134440 - protein, 9 aa, Homo sapiens
SRSRTPARR

SEQ ID NO: 134441 - protein, 9 aa, Homo sapiens
RSRTPARRG

SEQ ID NO: 134442 - protein, 9 aa, Homo sapiens
SRTPARRGR

SEQ ID NO: 134443 - protein, 9 aa, Homo sapiens
RTPARRGRS

SEQ ID NO: 134444 - protein, 9 aa, Homo sapiens
TPARRGRSR

SEQ ID NO: 134445 - protein, 9 aa, Homo sapiens
PARRGRSRS

SEQ ID NO: 134446 - protein, 9 aa, Homo sapiens
ARRGRSRSR

SEQ ID NO: 134447 - protein, 9 aa, Homo sapiens
RRGRSRSRT

SEQ ID NO: 134448 - protein, 9 aa, Homo sapiens
RGRSRSRTP

SEQ ID NO: 134449 - protein, 9 aa, Homo sapiens
GRSRSRTPA

SEQ ID NO: 134450 - protein, 9 aa, Homo sapiens
RSRSRTPAR

SEQ ID NO: 134451 - protein, 9 aa, Homo sapiens
SRSRTPARR

SEQ ID NO: 134452 - protein, 9 aa, Homo sapiens
RSRTPARRG

SEQ ID NO: 134453 - protein, 9 aa, Homo sapiens
SRTPARRGR

SEQ ID NO: 134454 - protein, 9 aa, Homo sapiens
RTPARRGRS

SEQ ID NO: 134455 - protein, 9 aa, Homo sapiens
TPARRGRSR

SEQ ID NO: 134456 - protein, 9 aa, Homo sapiens
PARRGRSRS

SEQ ID NO: 134457 - protein, 9 aa, Homo sapiens
ARRGRSRSR

SEQ ID NO: 134458 - protein, 9 aa, Homo sapiens
RRGRSRSRT

SEQ ID NO: 134459 - protein, 9 aa, Homo sapiens
RGRSRSRTP

SEQ ID NO: 134460 - protein, 9 aa, Homo sapiens
GRSRSRTPA

SEQ ID NO: 134461 - protein, 9 aa, Homo sapiens
RSRSRTPAR

SEQ ID NO: 134462 - protein, 9 aa, Homo sapiens
SRSRTPARR

SEQ ID NO: 134463 - protein, 9 aa, Homo sapiens
RSRTPARRS

SEQ ID NO: 134464 - protein, 9 aa, Homo sapiens
SRTPARRSG

SEQ ID NO: 134465 - protein, 9 aa, Homo sapiens
RTPARRSGR

SEQ ID NO: 134466 - protein, 9 aa, Homo sapiens
TPARRSGRS

SEQ ID NO: 134467 - protein, 9 aa, Homo sapiens
PARRSGRSR

SEQ ID NO: 134468 - protein, 9 aa, Homo sapiens
ARRSGRSRS

SEQ ID NO: 134469 - protein, 9 aa, Homo sapiens
RRSGRSRSR

SEQ ID NO: 134470 - protein, 9 aa, Homo sapiens
RSGRSRSRT

SEQ ID NO: 134471 - protein, 9 aa, Homo sapiens
SGRSRSRTP

SEQ ID NO: 134472 - protein, 9 aa, Homo sapiens
GRSRSRTPA

SEQ ID NO: 134473 - protein, 9 aa, Homo sapiens
RSRSRTPAR

SEQ ID NO: 134474 - protein, 9 aa, Homo sapiens
SRSRTPARR

SEQ ID NO: 134475 - protein, 9 aa, Homo sapiens
RSRTPARRG

SEQ ID NO: 134476 - protein, 9 aa, Homo sapiens
SRTPARRGR

SEQ ID NO: 134477 - protein, 9 aa, Homo sapiens
RTPARRGRS

SEQ ID NO: 134478 - protein, 9 aa, Homo sapiens
TPARRGRSR

SEQ ID NO: 134479 - protein, 9 aa, Homo sapiens
PARRGRSRS

SEQ ID NO: 134480 - protein, 9 aa, Homo sapiens
ARRGRSRSR

SEQ ID NO: 134481 - protein, 9 aa, Homo sapiens
RRGRSRSRT

SEQ ID NO: 134482 - protein, 9 aa, Homo sapiens
RGRSRSRTP

SEQ ID NO: 134483 - protein, 9 aa, Homo sapiens
GRSRSRTPR

SEQ ID NO: 134484 - protein, 9 aa, Homo sapiens
RSRSRTPRR

SEQ ID NO: 134485 - protein, 9 aa, Homo sapiens
SRSRTPRRG

SEQ ID NO: 134486 - protein, 9 aa, Homo sapiens
RSRTPRRGR

SEQ ID NO: 134487 - protein, 9 aa, Homo sapiens
SRTPRRGRS

SEQ ID NO: 134488 - protein, 9 aa, Homo sapiens
RTPRRGRSR

SEQ ID NO: 134489 - protein, 9 aa, Homo sapiens
TPRRGRSRS

SEQ ID NO: 134490 - protein, 9 aa, Homo sapiens
PRRGRSRSR

SEQ ID NO: 134491 - protein, 9 aa, Homo sapiens
RRGRSRSRS

SEQ ID NO: 134492 - protein, 9 aa, Homo sapiens
RGRSRSRSL

SEQ ID NO: 134493 - protein, 9 aa, Homo sapiens
GRSRSRSLV

SEQ ID NO: 134494 - protein, 9 aa, Homo sapiens
RSRSRSLVR

SEQ ID NO: 134495 - protein, 9 aa, Homo sapiens
SRSRSLVRR

SEQ ID NO: 134496 - protein, 9 aa, Homo sapiens
RSRSLVRRG

SEQ ID NO: 134497 - protein, 9 aa, Homo sapiens
SRSLVRRGR

SEQ ID NO: 134498 - protein, 9 aa, Homo sapiens
RSLVRRGRS

SEQ ID NO: 134499 - protein, 9 aa, Homo sapiens
SLVRRGRSH

SEQ ID NO: 134500 - protein, 9 aa, Homo sapiens
LVRRGRSHS

SEQ ID NO: 134501 - protein, 9 aa, Homo sapiens
VRRGRSHSR

SEQ ID NO: 134502 - protein, 9 aa, Homo sapiens
RRGRSHSRT

SEQ ID NO: 134503 - protein, 9 aa, Homo sapiens
RGRSHSRTP

SEQ ID NO: 134504 - protein, 9 aa, Homo sapiens
GRSHSRTPQ

SEQ ID NO: 134505 - protein, 9 aa, Homo sapiens
RSHSRTPQR

SEQ ID NO: 134506 - protein, 9 aa, Homo sapiens
SHSRTPQRR

SEQ ID NO: 134507 - protein, 9 aa, Homo sapiens
HSRTPQRRG

SEQ ID NO: 134508 - protein, 9 aa, Homo sapiens
SRTPQRRGR

SEQ ID NO: 134509 - protein, 9 aa, Homo sapiens
RTPQRRGRS

SEQ ID NO: 134510 - protein, 9 aa, Homo sapiens
TPQRRGRSG

SEQ ID NO: 134511 - protein, 9 aa, Homo sapiens
PQRRGRSGS

SEQ ID NO: 134512 - protein, 9 aa, Homo sapiens
QRRGRSGSS

SEQ ID NO: 134513 - protein, 9 aa, Homo sapiens
RRGRSGSSS

SEQ ID NO: 134514 - protein, 9 aa, Homo sapiens
RGRSGSSSE

SEQ ID NO: 134515 - protein, 9 aa, Homo sapiens
GRSGSSSER

SEQ ID NO: 134516 - protein, 9 aa, Homo sapiens
RSGSSSERK

SEQ ID NO: 134517 - protein, 9 aa, Homo sapiens
SGSSSERKN

SEQ ID NO: 134518 - protein, 9 aa, Homo sapiens
GSSSERKNK

SEQ ID NO: 134519 - protein, 9 aa, Homo sapiens
SSSERKNKS

SEQ ID NO: 134520 - protein, 9 aa, Homo sapiens
SSERKNKSR

SEQ ID NO: 134521 - protein, 9 aa, Homo sapiens
SERKNKSRT

SEQ ID NO: 134522 - protein, 9 aa, Homo sapiens
ERKNKSRTS

SEQ ID NO: 134523 - protein, 9 aa, Homo sapiens
RKNKSRTSQ

SEQ ID NO: 134524 - protein, 9 aa, Homo sapiens
KNKSRTSQR

SEQ ID NO: 134525 - protein, 9 aa, Homo sapiens
NKSRTSQRR

SEQ ID NO: 134526 - protein, 9 aa, Homo sapiens
KSRTSQRRS

SEQ ID NO: 134527 - protein, 9 aa, Homo sapiens
SRTSQRRSR

SEQ ID NO: 134528 - protein, 9 aa, Homo sapiens
RTSQRRSRS

SEQ ID NO: 134529 - protein, 9 aa, Homo sapiens
TSQRRSRSN

SEQ ID NO: 134530 - protein, 9 aa, Homo sapiens
SQRRSRSNS

SEQ ID NO: 134531 - protein, 9 aa, Homo sapiens
QRRSRSNSS

SEQ ID NO: 134532 - protein, 9 aa, Homo sapiens
RRSRSNSSP

SEQ ID NO: 134533 - protein, 9 aa, Homo sapiens
RSRSNSSPE

SEQ ID NO: 134534 - protein, 9 aa, Homo sapiens
SRSNSSPEM

SEQ ID NO: 134535 - protein, 9 aa, Homo sapiens
RSNSSPEMK

SEQ ID NO: 134536 - protein, 9 aa, Homo sapiens
SNSSPEMKK

SEQ ID NO: 134537 - protein, 9 aa, Homo sapiens
NSSPEMKKS

SEQ ID NO: 134538 - protein, 9 aa, Homo sapiens
SSPEMKKSR

SEQ ID NO: 134539 - protein, 9 aa, Homo sapiens
SPEMKKSRI

SEQ ID NO: 134540 - protein, 9 aa, Homo sapiens
PEMKKSRIS

SEQ ID NO: 134541 - protein, 9 aa, Homo sapiens
EMKKSRISS

SEQ ID NO: 134542 - protein, 9 aa, Homo sapiens
MKKSRISSR

SEQ ID NO: 134543 - protein, 9 aa, Homo sapiens
KKSRISSRR

SEQ ID NO: 134544 - protein, 9 aa, Homo sapiens
KSRISSRRS

SEQ ID NO: 134545 - protein, 9 aa, Homo sapiens
SRISSRRSR

SEQ ID NO: 134546 - protein, 9 aa, Homo sapiens
RISSRRSRS

SEQ ID NO: 134547 - protein, 9 aa, Homo sapiens
ISSRRSRSL

SEQ ID NO: 134548 - protein, 9 aa, Homo sapiens
SSRRSRSLS

SEQ ID NO: 134549 - protein, 9 aa, Homo sapiens
SRRSRSLSS

SEQ ID NO: 134550 - protein, 9 aa, Homo sapiens
RRSRSLSSP

SEQ ID NO: 134551 - protein, 9 aa, Homo sapiens
RSRSLSSPR

SEQ ID NO: 134552 - protein, 9 aa, Homo sapiens
SRSLSSPRS

SEQ ID NO: 134553 - protein, 9 aa, Homo sapiens
RSLSSPRSK

SEQ ID NO: 134554 - protein, 9 aa, Homo sapiens
SLSSPRSKA

SEQ ID NO: 134555 - protein, 9 aa, Homo sapiens
LSSPRSKAK

SEQ ID NO: 134556 - protein, 9 aa, Homo sapiens
SSPRSKAKS

SEQ ID NO: 134557 - protein, 9 aa, Homo sapiens
SPRSKAKSR

SEQ ID NO: 134558 - protein, 9 aa, Homo sapiens
PRSKAKSRL

SEQ ID NO: 134559 - protein, 9 aa, Homo sapiens
RSKAKSRLS

SEQ ID NO: 134560 - protein, 9 aa, Homo sapiens
SKAKSRLSL

SEQ ID NO: 134561 - protein, 9 aa, Homo sapiens
KAKSRLSLR

SEQ ID NO: 134562 - protein, 9 aa, Homo sapiens
AKSRLSLRR

SEQ ID NO: 134563 - protein, 9 aa, Homo sapiens
KSRLSLRRS

SEQ ID NO: 134564 - protein, 9 aa, Homo sapiens
SRLSLRRSL

SEQ ID NO: 134565 - protein, 9 aa, Homo sapiens
RLSLRRSLS

SEQ ID NO: 134566 - protein, 9 aa, Homo sapiens
LSLRRSLSG

SEQ ID NO: 134567 - protein, 9 aa, Homo sapiens
SLRRSLSGS

SEQ ID NO: 134568 - protein, 9 aa, Homo sapiens
LRRSLSGSS

SEQ ID NO: 134569 - protein, 9 aa, Homo sapiens
RRSLSGSSP

SEQ ID NO: 134570 - protein, 9 aa, Homo sapiens
RSLSGSSPC

SEQ ID NO: 134571 - protein, 9 aa, Homo sapiens
SLSGSSPCP

SEQ ID NO: 134572 - protein, 9 aa, Homo sapiens
LSGSSPCPK

SEQ ID NO: 134573 - protein, 9 aa, Homo sapiens
SGSSPCPKQ

SEQ ID NO: 134574 - protein, 9 aa, Homo sapiens
GSSPCPKQK

SEQ ID NO: 134575 - protein, 9 aa, Homo sapiens
SSPCPKQKS

SEQ ID NO: 134576 - protein, 9 aa, Homo sapiens
SPCPKQKSQ

SEQ ID NO: 134577 - protein, 9 aa, Homo sapiens
PCPKQKSQT

SEQ ID NO: 134578 - protein, 9 aa, Homo sapiens
CPKQKSQTP

SEQ ID NO: 134579 - protein, 9 aa, Homo sapiens
PKQKSQTPP

SEQ ID NO: 134580 - protein, 9 aa, Homo sapiens
KQKSQTPPR

SEQ ID NO: 134581 - protein, 9 aa, Homo sapiens
QKSQTPPRR

SEQ ID NO: 134582 - protein, 9 aa, Homo sapiens
KSQTPPRRS

SEQ ID NO: 134583 - protein, 9 aa, Homo sapiens
SQTPPRRSR

SEQ ID NO: 134584 - protein, 9 aa, Homo sapiens
QTPPRRSRS

SEQ ID NO: 134585 - protein, 9 aa, Homo sapiens
TPPRRSRSG

SEQ ID NO: 134586 - protein, 9 aa, Homo sapiens
PPRRSRSGS

SEQ ID NO: 134587 - protein, 9 aa, Homo sapiens
PRRSRSGSS

SEQ ID NO: 134588 - protein, 9 aa, Homo sapiens
RRSRSGSSQ

SEQ ID NO: 134589 - protein, 9 aa, Homo sapiens
RSRSGSSQP

SEQ ID NO: 134590 - protein, 9 aa, Homo sapiens
SRSGSSQPK

SEQ ID NO: 134591 - protein, 9 aa, Homo sapiens
RSGSSQPKA

SEQ ID NO: 134592 - protein, 9 aa, Homo sapiens
SGSSQPKAK

SEQ ID NO: 134593 - protein, 9 aa, Homo sapiens
GSSQPKAKS

SEQ ID NO: 134594 - protein, 9 aa, Homo sapiens
SSQPKAKSR

SEQ ID NO: 134595 - protein, 9 aa, Homo sapiens
SQPKAKSRT

SEQ ID NO: 134596 - protein, 9 aa, Homo sapiens
QPKAKSRTP

SEQ ID NO: 134597 - protein, 9 aa, Homo sapiens
PKAKSRTPP

SEQ ID NO: 134598 - protein, 9 aa, Homo sapiens
KAKSRTPPR

SEQ ID NO: 134599 - protein, 9 aa, Homo sapiens
AKSRTPPRR

SEQ ID NO: 134600 - protein, 9 aa, Homo sapiens
KSRTPPRRS

SEQ ID NO: 134601 - protein, 9 aa, Homo sapiens
SRTPPRRSR

SEQ ID NO: 134602 - protein, 9 aa, Homo sapiens
RTPPRRSRS

SEQ ID NO: 134603 - protein, 9 aa, Homo sapiens
TPPRRSRSS

SEQ ID NO: 134604 - protein, 9 aa, Homo sapiens
PPRRSRSSS

SEQ ID NO: 134605 - protein, 9 aa, Homo sapiens
PRRSRSSSS

SEQ ID NO: 134606 - protein, 9 aa, Homo sapiens
RRSRSSSSP

SEQ ID NO: 134607 - protein, 9 aa, Homo sapiens
RSRSSSSPP

SEQ ID NO: 134608 - protein, 9 aa, Homo sapiens
SRSSSSPPP

SEQ ID NO: 134609 - protein, 9 aa, Homo sapiens
RSSSSPPPK

SEQ ID NO: 134610 - protein, 9 aa, Homo sapiens
SSSSPPPKQ

SEQ ID NO: 134611 - protein, 9 aa, Homo sapiens
SSSPPPKQK

SEQ ID NO: 134612 - protein, 9 aa, Homo sapiens
SSPPPKQKS

SEQ ID NO: 134613 - protein, 9 aa, Homo sapiens
SPPPKQKSK

SEQ ID NO: 134614 - protein, 9 aa, Homo sapiens
PPPKQKSKT

SEQ ID NO: 134615 - protein, 9 aa, Homo sapiens
PPKQKSKTP

SEQ ID NO: 134616 - protein, 9 aa, Homo sapiens
PKQKSKTPS

SEQ ID NO: 134617 - protein, 9 aa, Homo sapiens
KQKSKTPSR

SEQ ID NO: 134618 - protein, 9 aa, Homo sapiens
QKSKTPSRQ

SEQ ID NO: 134619 - protein, 9 aa, Homo sapiens
KSKTPSRQS

SEQ ID NO: 134620 - protein, 9 aa, Homo sapiens
SKTPSRQSH

SEQ ID NO: 134621 - protein, 9 aa, Homo sapiens
KTPSRQSHS

SEQ ID NO: 134622 - protein, 9 aa, Homo sapiens
TPSRQSHSS

SEQ ID NO: 134623 - protein, 9 aa, Homo sapiens
PSRQSHSSS

SEQ ID NO: 134624 - protein, 9 aa, Homo sapiens
SRQSHSSSS

SEQ ID NO: 134625 - protein, 9 aa, Homo sapiens
RQSHSSSSP

SEQ ID NO: 134626 - protein, 9 aa, Homo sapiens
QSHSSSSPH

SEQ ID NO: 134627 - protein, 9 aa, Homo sapiens
SHSSSSPHP

SEQ ID NO: 134628 - protein, 9 aa, Homo sapiens
HSSSSPHPK

SEQ ID NO: 134629 - protein, 9 aa, Homo sapiens
SSSSPHPKV

SEQ ID NO: 134630 - protein, 9 aa, Homo sapiens
SSSPHPKVK

SEQ ID NO: 134631 - protein, 9 aa, Homo sapiens
SSPHPKVKS

SEQ ID NO: 134632 - protein, 9 aa, Homo sapiens
SPHPKVKSG

SEQ ID NO: 134633 - protein, 9 aa, Homo sapiens
PHPKVKSGT

SEQ ID NO: 134634 - protein, 9 aa, Homo sapiens
HPKVKSGTP

SEQ ID NO: 134635 - protein, 9 aa, Homo sapiens
PKVKSGTPP

SEQ ID NO: 134636 - protein, 9 aa, Homo sapiens
KVKSGTPPR

SEQ ID NO: 134637 - protein, 9 aa, Homo sapiens
VKSGTPPRQ

SEQ ID NO: 134638 - protein, 9 aa, Homo sapiens
KSGTPPRQG

SEQ ID NO: 134639 - protein, 9 aa, Homo sapiens
SGTPPRQGS

SEQ ID NO: 134640 - protein, 9 aa, Homo sapiens
GTPPRQGSI

SEQ ID NO: 134641 - protein, 9 aa, Homo sapiens
TPPRQGSIT

SEQ ID NO: 134642 - protein, 9 aa, Homo sapiens
PPRQGSITS

SEQ ID NO: 134643 - protein, 9 aa, Homo sapiens
PRQGSITSP

SEQ ID NO: 134644 - protein, 9 aa, Homo sapiens
RQGSITSPQ

SEQ ID NO: 134645 - protein, 9 aa, Homo sapiens
QGSITSPQA

SEQ ID NO: 134646 - protein, 9 aa, Homo sapiens
GSITSPQAN

SEQ ID NO: 134647 - protein, 9 aa, Homo sapiens
SITSPQANE

SEQ ID NO: 134648 - protein, 9 aa, Homo sapiens
ITSPQANEQ

SEQ ID NO: 134649 - protein, 9 aa, Homo sapiens
TSPQANEQS

SEQ ID NO: 134650 - protein, 9 aa, Homo sapiens
SPQANEQSV

SEQ ID NO: 134651 - protein, 9 aa, Homo sapiens
PQANEQSVT

SEQ ID NO: 134652 - protein, 9 aa, Homo sapiens
QANEQSVTP

SEQ ID NO: 134653 - protein, 9 aa, Homo sapiens
ANEQSVTPQ

SEQ ID NO: 134654 - protein, 9 aa, Homo sapiens
NEQSVTPQR

SEQ ID NO: 134655 - protein, 9 aa, Homo sapiens
EQSVTPQRR

SEQ ID NO: 134656 - protein, 9 aa, Homo sapiens
QSVTPQRRS

SEQ ID NO: 134657 - protein, 9 aa, Homo sapiens
SVTPQRRSC

SEQ ID NO: 134658 - protein, 9 aa, Homo sapiens
VTPQRRSCF

SEQ ID NO: 134659 - protein, 9 aa, Homo sapiens
TPQRRSCFE

SEQ ID NO: 134660 - protein, 9 aa, Homo sapiens
PQRRSCFES

SEQ ID NO: 134661 - protein, 9 aa, Homo sapiens
QRRSCFESS

SEQ ID NO: 134662 - protein, 9 aa, Homo sapiens
RRSCFESSP

SEQ ID NO: 134663 - protein, 9 aa, Homo sapiens
RSCFESSPD

SEQ ID NO: 134664 - protein, 9 aa, Homo sapiens
SCFESSPDP

SEQ ID NO: 134665 - protein, 9 aa, Homo sapiens
CFESSPDPE

SEQ ID NO: 134666 - protein, 9 aa, Homo sapiens
FESSPDPEL

SEQ ID NO: 134667 - protein, 9 aa, Homo sapiens
ESSPDPELK

SEQ ID NO: 134668 - protein, 9 aa, Homo sapiens
SSPDPELKS

SEQ ID NO: 134669 - protein, 9 aa, Homo sapiens
SPDPELKSR

SEQ ID NO: 134670 - protein, 9 aa, Homo sapiens
PDPELKSRT

SEQ ID NO: 134671 - protein, 9 aa, Homo sapiens
DPELKSRTP

SEQ ID NO: 134672 - protein, 9 aa, Homo sapiens
PELKSRTPS

SEQ ID NO: 134673 - protein, 9 aa, Homo sapiens
ELKSRTPSR

SEQ ID NO: 134674 - protein, 9 aa, Homo sapiens
LKSRTPSRH

SEQ ID NO: 134675 - protein, 9 aa, Homo sapiens
KSRTPSRHS

SEQ ID NO: 134676 - protein, 9 aa, Homo sapiens
SRTPSRHSC

SEQ ID NO: 134677 - protein, 9 aa, Homo sapiens
RTPSRHSCS

SEQ ID NO: 134678 - protein, 9 aa, Homo sapiens
TPSRHSCSG

SEQ ID NO: 134679 - protein, 9 aa, Homo sapiens
PSRHSCSGS

SEQ ID NO: 134680 - protein, 9 aa, Homo sapiens
SRHSCSGSS

SEQ ID NO: 134681 - protein, 9 aa, Homo sapiens
RHSCSGSSP

SEQ ID NO: 134682 - protein, 9 aa, Homo sapiens
HSCSGSSPP

SEQ ID NO: 134683 - protein, 9 aa, Homo sapiens
SCSGSSPPR

SEQ ID NO: 134684 - protein, 9 aa, Homo sapiens
CSGSSPPRV

SEQ ID NO: 134685 - protein, 9 aa, Homo sapiens
SGSSPPRVK

SEQ ID NO: 134686 - protein, 9 aa, Homo sapiens
GSSPPRVKS

SEQ ID NO: 134687 - protein, 9 aa, Homo sapiens
SSPPRVKSS

SEQ ID NO: 134688 - protein, 9 aa, Homo sapiens
SPPRVKSST

SEQ ID NO: 134689 - protein, 9 aa, Homo sapiens
PPRVKSSTP

SEQ ID NO: 134690 - protein, 9 aa, Homo sapiens
PRVKSSTPP

SEQ ID NO: 134691 - protein, 9 aa, Homo sapiens
RVKSSTPPR

SEQ ID NO: 134692 - protein, 9 aa, Homo sapiens
VKSSTPPRQ

SEQ ID NO: 134693 - protein, 9 aa, Homo sapiens
KSSTPPRQS

SEQ ID NO: 134694 - protein, 9 aa, Homo sapiens
SSTPPRQSP

SEQ ID NO: 134695 - protein, 9 aa, Homo sapiens
STPPRQSPS

SEQ ID NO: 134696 - protein, 9 aa, Homo sapiens
TPPRQSPSR

SEQ ID NO: 134697 - protein, 9 aa, Homo sapiens
PPRQSPSRS

SEQ ID NO: 134698 - protein, 9 aa, Homo sapiens
PRQSPSRSS

SEQ ID NO: 134699 - protein, 9 aa, Homo sapiens
RQSPSRSSS

SEQ ID NO: 134700 - protein, 9 aa, Homo sapiens
QSPSRSSSP

SEQ ID NO: 134701 - protein, 9 aa, Homo sapiens
SPSRSSSPQ

SEQ ID NO: 134702 - protein, 9 aa, Homo sapiens
PSRSSSPQP

SEQ ID NO: 134703 - protein, 9 aa, Homo sapiens
SRSSSPQPK

SEQ ID NO: 134704 - protein, 9 aa, Homo sapiens
RSSSPQPKV

SEQ ID NO: 134705 - protein, 9 aa, Homo sapiens
SSSPQPKVK

SEQ ID NO: 134706 - protein, 9 aa, Homo sapiens
SSPQPKVKA

SEQ ID NO: 134707 - protein, 9 aa, Homo sapiens
SPQPKVKAI

SEQ ID NO: 134708 - protein, 9 aa, Homo sapiens
PQPKVKAII

SEQ ID NO: 134709 - protein, 9 aa, Homo sapiens
QPKVKAIIS

SEQ ID NO: 134710 - protein, 9 aa, Homo sapiens
PKVKAIISP

SEQ ID NO: 134711 - protein, 9 aa, Homo sapiens
KVKAIISPR

SEQ ID NO: 134712 - protein, 9 aa, Homo sapiens
VKAIISPRQ

SEQ ID NO: 134713 - protein, 9 aa, Homo sapiens
KAIISPRQR

SEQ ID NO: 134714 - protein, 9 aa, Homo sapiens
AIISPRQRS

SEQ ID NO: 134715 - protein, 9 aa, Homo sapiens
IISPRQRSH

SEQ ID NO: 134716 - protein, 9 aa, Homo sapiens
ISPRQRSHS

SEQ ID NO: 134717 - protein, 9 aa, Homo sapiens
SPRQRSHSG

SEQ ID NO: 134718 - protein, 9 aa, Homo sapiens
PRQRSHSGS

SEQ ID NO: 134719 - protein, 9 aa, Homo sapiens
RQRSHSGSS

SEQ ID NO: 134720 - protein, 9 aa, Homo sapiens
QRSHSGSSS

SEQ ID NO: 134721 - protein, 9 aa, Homo sapiens
RSHSGSSSP

SEQ ID NO: 134722 - protein, 9 aa, Homo sapiens
SHSGSSSPS

SEQ ID NO: 134723 - protein, 9 aa, Homo sapiens
HSGSSSPSP

SEQ ID NO: 134724 - protein, 9 aa, Homo sapiens
SGSSSPSPS

SEQ ID NO: 134725 - protein, 9 aa, Homo sapiens
GSSSPSPSR

SEQ ID NO: 134726 - protein, 9 aa, Homo sapiens
SSSPSPSRV

SEQ ID NO: 134727 - protein, 9 aa, Homo sapiens
SSPSPSRVT

SEQ ID NO: 134728 - protein, 9 aa, Homo sapiens
SPSPSRVTS

SEQ ID NO: 134729 - protein, 9 aa, Homo sapiens
PSPSRVTSR

SEQ ID NO: 134730 - protein, 9 aa, Homo sapiens
SPSRVTSRT

SEQ ID NO: 134731 - protein, 9 aa, Homo sapiens
PSRVTSRTT

SEQ ID NO: 134732 - protein, 9 aa, Homo sapiens
SRVTSRTTP

SEQ ID NO: 134733 - protein, 9 aa, Homo sapiens
RVTSRTTPR

SEQ ID NO: 134734 - protein, 9 aa, Homo sapiens
VTSRTTPRR

SEQ ID NO: 134735 - protein, 9 aa, Homo sapiens
TSRTTPRRS

SEQ ID NO: 134736 - protein, 9 aa, Homo sapiens
SRTTPRRSR

SEQ ID NO: 134737 - protein, 9 aa, Homo sapiens
RTTPRRSRS

SEQ ID NO: 134738 - protein, 9 aa, Homo sapiens
TTPRRSRSV

SEQ ID NO: 134739 - protein, 9 aa, Homo sapiens
TPRRSRSVS

SEQ ID NO: 134740 - protein, 9 aa, Homo sapiens
PRRSRSVSP

SEQ ID NO: 134741 - protein, 9 aa, Homo sapiens
RRSRSVSPC

SEQ ID NO: 134742 - protein, 9 aa, Homo sapiens
RSRSVSPCS

SEQ ID NO: 134743 - protein, 9 aa, Homo sapiens
SRSVSPCSN

SEQ ID NO: 134744 - protein, 9 aa, Homo sapiens
RSVSPCSNV

SEQ ID NO: 134745 - protein, 9 aa, Homo sapiens
SVSPCSNVE

SEQ ID NO: 134746 - protein, 9 aa, Homo sapiens
VSPCSNVES

SEQ ID NO: 134747 - protein, 9 aa, Homo sapiens
SPCSNVESR

SEQ ID NO: 134748 - protein, 9 aa, Homo sapiens
PCSNVESRL

SEQ ID NO: 134749 - protein, 9 aa, Homo sapiens
CSNVESRLL

SEQ ID NO: 134750 - protein, 9 aa, Homo sapiens
SNVESRLLP

SEQ ID NO: 134751 - protein, 9 aa, Homo sapiens
NVESRLLPR

SEQ ID NO: 134752 - protein, 9 aa, Homo sapiens
VESRLLPRY

SEQ ID NO: 134753 - protein, 9 aa, Homo sapiens
ESRLLPRYS

SEQ ID NO: 134754 - protein, 9 aa, Homo sapiens
SRLLPRYSH

SEQ ID NO: 134755 - protein, 9 aa, Homo sapiens
RLLPRYSHS

SEQ ID NO: 134756 - protein, 9 aa, Homo sapiens
LLPRYSHSG

SEQ ID NO: 134757 - protein, 9 aa, Homo sapiens
LPRYSHSGS

SEQ ID NO: 134758 - protein, 9 aa, Homo sapiens
PRYSHSGSS

SEQ ID NO: 134759 - protein, 9 aa, Homo sapiens
RYSHSGSSS

SEQ ID NO: 134760 - protein, 9 aa, Homo sapiens
YSHSGSSSP

SEQ ID NO: 134761 - protein, 9 aa, Homo sapiens
SHSGSSSPD

SEQ ID NO: 134762 - protein, 9 aa, Homo sapiens
HSGSSSPDT

SEQ ID NO: 134763 - protein, 9 aa, Homo sapiens
SGSSSPDTK

SEQ ID NO: 134764 - protein, 9 aa, Homo sapiens
GSSSPDTKV

SEQ ID NO: 134765 - protein, 9 aa, Homo sapiens
SSSPDTKVK

SEQ ID NO: 134766 - protein, 9 aa, Homo sapiens
SSPDTKVKP

SEQ ID NO: 134767 - protein, 9 aa, Homo sapiens
SPDTKVKPE

SEQ ID NO: 134768 - protein, 9 aa, Homo sapiens
PDTKVKPET

SEQ ID NO: 134769 - protein, 9 aa, Homo sapiens
DTKVKPETP

SEQ ID NO: 134770 - protein, 9 aa, Homo sapiens
TKVKPETPP

SEQ ID NO: 134771 - protein, 9 aa, Homo sapiens
KVKPETPPR

SEQ ID NO: 134772 - protein, 9 aa, Homo sapiens
VKPETPPRQ

SEQ ID NO: 134773 - protein, 9 aa, Homo sapiens
KPETPPRQS

SEQ ID NO: 134774 - protein, 9 aa, Homo sapiens
PETPPRQSH

SEQ ID NO: 134775 - protein, 9 aa, Homo sapiens
ETPPRQSHS

SEQ ID NO: 134776 - protein, 9 aa, Homo sapiens
TPPRQSHSG

SEQ ID NO: 134777 - protein, 9 aa, Homo sapiens
PPRQSHSGS

SEQ ID NO: 134778 - protein, 9 aa, Homo sapiens
PRQSHSGSI

SEQ ID NO: 134779 - protein, 9 aa, Homo sapiens
RQSHSGSIS

SEQ ID NO: 134780 - protein, 9 aa, Homo sapiens
QSHSGSISP

SEQ ID NO: 134781 - protein, 9 aa, Homo sapiens
SHSGSISPY

SEQ ID NO: 134782 - protein, 9 aa, Homo sapiens
HSGSISPYP

SEQ ID NO: 134783 - protein, 9 aa, Homo sapiens
SGSISPYPK

SEQ ID NO: 134784 - protein, 9 aa, Homo sapiens
GSISPYPKV

SEQ ID NO: 134785 - protein, 9 aa, Homo sapiens
SISPYPKVK

SEQ ID NO: 134786 - protein, 9 aa, Homo sapiens
ISPYPKVKA

SEQ ID NO: 134787 - protein, 9 aa, Homo sapiens
SPYPKVKAQ

SEQ ID NO: 134788 - protein, 9 aa, Homo sapiens
PYPKVKAQT

SEQ ID NO: 134789 - protein, 9 aa, Homo sapiens
YPKVKAQTP

SEQ ID NO: 134790 - protein, 9 aa, Homo sapiens
PKVKAQTPP

SEQ ID NO: 134791 - protein, 9 aa, Homo sapiens
KVKAQTPPG

SEQ ID NO: 134792 - protein, 9 aa, Homo sapiens
VKAQTPPGP

SEQ ID NO: 134793 - protein, 9 aa, Homo sapiens
KAQTPPGPS

SEQ ID NO: 134794 - protein, 9 aa, Homo sapiens
AQTPPGPSL

SEQ ID NO: 134795 - protein, 9 aa, Homo sapiens
QTPPGPSLS

SEQ ID NO: 134796 - protein, 9 aa, Homo sapiens
TPPGPSLSG

SEQ ID NO: 134797 - protein, 9 aa, Homo sapiens
PPGPSLSGS

SEQ ID NO: 134798 - protein, 9 aa, Homo sapiens
PGPSLSGSK

SEQ ID NO: 134799 - protein, 9 aa, Homo sapiens
GPSLSGSKS

SEQ ID NO: 134800 - protein, 9 aa, Homo sapiens
PSLSGSKSP

SEQ ID NO: 134801 - protein, 9 aa, Homo sapiens
SLSGSKSPC

SEQ ID NO: 134802 - protein, 9 aa, Homo sapiens
LSGSKSPCP

SEQ ID NO: 134803 - protein, 9 aa, Homo sapiens
SGSKSPCPQ

SEQ ID NO: 134804 - protein, 9 aa, Homo sapiens
GSKSPCPQE

SEQ ID NO: 134805 - protein, 9 aa, Homo sapiens
SKSPCPQEK

SEQ ID NO: 134806 - protein, 9 aa, Homo sapiens
KSPCPQEKS

SEQ ID NO: 134807 - protein, 9 aa, Homo sapiens
SPCPQEKSK

SEQ ID NO: 134808 - protein, 9 aa, Homo sapiens
PCPQEKSKD

SEQ ID NO: 134809 - protein, 9 aa, Homo sapiens
CPQEKSKDS

SEQ ID NO: 134810 - protein, 9 aa, Homo sapiens
PQEKSKDSL

SEQ ID NO: 134811 - protein, 9 aa, Homo sapiens
QEKSKDSLV

SEQ ID NO: 134812 - protein, 9 aa, Homo sapiens
EKSKDSLVQ

SEQ ID NO: 134813 - protein, 9 aa, Homo sapiens
KSKDSLVQS

SEQ ID NO: 134814 - protein, 9 aa, Homo sapiens
SKDSLVQSC

SEQ ID NO: 134815 - protein, 9 aa, Homo sapiens
KDSLVQSCP

SEQ ID NO: 134816 - protein, 9 aa, Homo sapiens
DSLVQSCPG

SEQ ID NO: 134817 - protein, 9 aa, Homo sapiens
SLVQSCPGS

SEQ ID NO: 134818 - protein, 9 aa, Homo sapiens
LVQSCPGSL

SEQ ID NO: 134819 - protein, 9 aa, Homo sapiens
VQSCPGSLS

SEQ ID NO: 134820 - protein, 9 aa, Homo sapiens
QSCPGSLSL

SEQ ID NO: 134821 - protein, 9 aa, Homo sapiens
SCPGSLSLC

SEQ ID NO: 134822 - protein, 9 aa, Homo sapiens
CPGSLSLCA

SEQ ID NO: 134823 - protein, 9 aa, Homo sapiens
PGSLSLCAG

SEQ ID NO: 134824 - protein, 9 aa, Homo sapiens
GSLSLCAGV

SEQ ID NO: 134825 - protein, 9 aa, Homo sapiens
SLSLCAGVK

SEQ ID NO: 134826 - protein, 9 aa, Homo sapiens
LSLCAGVKS

SEQ ID NO: 134827 - protein, 9 aa, Homo sapiens
SLCAGVKSS

SEQ ID NO: 134828 - protein, 9 aa, Homo sapiens
LCAGVKSST

SEQ ID NO: 134829 - protein, 9 aa, Homo sapiens
CAGVKSSTP

SEQ ID NO: 134830 - protein, 9 aa, Homo sapiens
AGVKSSTPP

SEQ ID NO: 134831 - protein, 9 aa, Homo sapiens
GVKSSTPPG

SEQ ID NO: 134832 - protein, 9 aa, Homo sapiens
VKSSTPPGE

SEQ ID NO: 134833 - protein, 9 aa, Homo sapiens
KSSTPPGES

SEQ ID NO: 134834 - protein, 9 aa, Homo sapiens
SSTPPGESY

SEQ ID NO: 134835 - protein, 9 aa, Homo sapiens
STPPGESYF

SEQ ID NO: 134836 - protein, 9 aa, Homo sapiens
TPPGESYFG

SEQ ID NO: 134837 - protein, 9 aa, Homo sapiens
PPGESYFGV

SEQ ID NO: 134838 - protein, 9 aa, Homo sapiens
PGESYFGVS

SEQ ID NO: 134839 - protein, 9 aa, Homo sapiens
GESYFGVSS

SEQ ID NO: 134840 - protein, 9 aa, Homo sapiens
ESYFGVSSL

SEQ ID NO: 134841 - protein, 9 aa, Homo sapiens
SYFGVSSLQ

SEQ ID NO: 134842 - protein, 9 aa, Homo sapiens
YFGVSSLQL

SEQ ID NO: 134843 - protein, 9 aa, Homo sapiens
FGVSSLQLK

SEQ ID NO: 134844 - protein, 9 aa, Homo sapiens
GVSSLQLKG

SEQ ID NO: 134845 - protein, 9 aa, Homo sapiens
VSSLQLKGQ

SEQ ID NO: 134846 - protein, 9 aa, Homo sapiens
SSLQLKGQS

SEQ ID NO: 134847 - protein, 9 aa, Homo sapiens
SLQLKGQSQ

SEQ ID NO: 134848 - protein, 9 aa, Homo sapiens
LQLKGQSQT

SEQ ID NO: 134849 - protein, 9 aa, Homo sapiens
QLKGQSQTS

SEQ ID NO: 134850 - protein, 9 aa, Homo sapiens
LKGQSQTSP

SEQ ID NO: 134851 - protein, 9 aa, Homo sapiens
KGQSQTSPD

SEQ ID NO: 134852 - protein, 9 aa, Homo sapiens
GQSQTSPDH

SEQ ID NO: 134853 - protein, 9 aa, Homo sapiens
QSQTSPDHR

SEQ ID NO: 134854 - protein, 9 aa, Homo sapiens
SQTSPDHRS

SEQ ID NO: 134855 - protein, 9 aa, Homo sapiens
QTSPDHRSD

SEQ ID NO: 134856 - protein, 9 aa, Homo sapiens
TSPDHRSDT

SEQ ID NO: 134857 - protein, 9 aa, Homo sapiens
SPDHRSDTS

SEQ ID NO: 134858 - protein, 9 aa, Homo sapiens
PDHRSDTSS

SEQ ID NO: 134859 - protein, 9 aa, Homo sapiens
DHRSDTSSP

SEQ ID NO: 134860 - protein, 9 aa, Homo sapiens
HRSDTSSPE

SEQ ID NO: 134861 - protein, 9 aa, Homo sapiens
RSDTSSPEV

SEQ ID NO: 134862 - protein, 9 aa, Homo sapiens
SDTSSPEVR

SEQ ID NO: 134863 - protein, 9 aa, Homo sapiens
DTSSPEVRQ

SEQ ID NO: 134864 - protein, 9 aa, Homo sapiens
TSSPEVRQS

SEQ ID NO: 134865 - protein, 9 aa, Homo sapiens
SSPEVRQSH

SEQ ID NO: 134866 - protein, 9 aa, Homo sapiens
SPEVRQSHS

SEQ ID NO: 134867 - protein, 9 aa, Homo sapiens
PEVRQSHSE

SEQ ID NO: 134868 - protein, 9 aa, Homo sapiens
EVRQSHSES

SEQ ID NO: 134869 - protein, 9 aa, Homo sapiens
VRQSHSESP

SEQ ID NO: 134870 - protein, 9 aa, Homo sapiens
RQSHSESPS

SEQ ID NO: 134871 - protein, 9 aa, Homo sapiens
QSHSESPSL

SEQ ID NO: 134872 - protein, 9 aa, Homo sapiens
SHSESPSLQ

SEQ ID NO: 134873 - protein, 9 aa, Homo sapiens
HSESPSLQS

SEQ ID NO: 134874 - protein, 9 aa, Homo sapiens
SESPSLQSK

SEQ ID NO: 134875 - protein, 9 aa, Homo sapiens
ESPSLQSKS

SEQ ID NO: 134876 - protein, 9 aa, Homo sapiens
SPSLQSKSQ

SEQ ID NO: 134877 - protein, 9 aa, Homo sapiens
PSLQSKSQT

SEQ ID NO: 134878 - protein, 9 aa, Homo sapiens
SLQSKSQTS

SEQ ID NO: 134879 - protein, 9 aa, Homo sapiens
LQSKSQTSP

SEQ ID NO: 134880 - protein, 9 aa, Homo sapiens
QSKSQTSPK

SEQ ID NO: 134881 - protein, 9 aa, Homo sapiens
SKSQTSPKG

SEQ ID NO: 134882 - protein, 9 aa, Homo sapiens
KSQTSPKGG

SEQ ID NO: 134883 - protein, 9 aa, Homo sapiens
SQTSPKGGR

SEQ ID NO: 134884 - protein, 9 aa, Homo sapiens
QTSPKGGRS

SEQ ID NO: 134885 - protein, 9 aa, Homo sapiens
TSPKGGRSR

SEQ ID NO: 134886 - protein, 9 aa, Homo sapiens
SPKGGRSRS

SEQ ID NO: 134887 - protein, 9 aa, Homo sapiens
PKGGRSRSS

SEQ ID NO: 134888 - protein, 9 aa, Homo sapiens
KGGRSRSSS

SEQ ID NO: 134889 - protein, 9 aa, Homo sapiens
GGRSRSSSP

SEQ ID NO: 134890 - protein, 9 aa, Homo sapiens
GRSRSSSPV

SEQ ID NO: 134891 - protein, 9 aa, Homo sapiens
RSRSSSPVT

SEQ ID NO: 134892 - protein, 9 aa, Homo sapiens
SRSSSPVTE

SEQ ID NO: 134893 - protein, 9 aa, Homo sapiens
RSSSPVTEL

SEQ ID NO: 134894 - protein, 9 aa, Homo sapiens
SSSPVTELA

SEQ ID NO: 134895 - protein, 9 aa, Homo sapiens
SSPVTELAS

SEQ ID NO: 134896 - protein, 9 aa, Homo sapiens
SPVTELASR

SEQ ID NO: 134897 - protein, 9 aa, Homo sapiens
PVTELASRS

SEQ ID NO: 134898 - protein, 9 aa, Homo sapiens
VTELASRSP

SEQ ID NO: 134899 - protein, 9 aa, Homo sapiens
TELASRSPI

SEQ ID NO: 134900 - protein, 9 aa, Homo sapiens
ELASRSPIR

SEQ ID NO: 134901 - protein, 9 aa, Homo sapiens
LASRSPIRQ

SEQ ID NO: 134902 - protein, 9 aa, Homo sapiens
ASRSPIRQD

SEQ ID NO: 134903 - protein, 9 aa, Homo sapiens
SRSPIRQDR

SEQ ID NO: 134904 - protein, 9 aa, Homo sapiens
RSPIRQDRG

SEQ ID NO: 134905 - protein, 9 aa, Homo sapiens
SPIRQDRGE

SEQ ID NO: 134906 - protein, 9 aa, Homo sapiens
PIRQDRGEF

SEQ ID NO: 134907 - protein, 9 aa, Homo sapiens
IRQDRGEFS

SEQ ID NO: 134908 - protein, 9 aa, Homo sapiens
RQDRGEFSA

SEQ ID NO: 134909 - protein, 9 aa, Homo sapiens
QDRGEFSAS

SEQ ID NO: 134910 - protein, 9 aa, Homo sapiens
DRGEFSASP

SEQ ID NO: 134911 - protein, 9 aa, Homo sapiens
RGEFSASPM

SEQ ID NO: 134912 - protein, 9 aa, Homo sapiens
GEFSASPML

SEQ ID NO: 134913 - protein, 9 aa, Homo sapiens
EFSASPMLK

SEQ ID NO: 134914 - protein, 9 aa, Homo sapiens
FSASPMLKS

SEQ ID NO: 134915 - protein, 9 aa, Homo sapiens
SASPMLKSG

SEQ ID NO: 134916 - protein, 9 aa, Homo sapiens
ASPMLKSGM

SEQ ID NO: 134917 - protein, 9 aa, Homo sapiens
SPMLKSGMS

SEQ ID NO: 134918 - protein, 9 aa, Homo sapiens
PMLKSGMSP

SEQ ID NO: 134919 - protein, 9 aa, Homo sapiens
MLKSGMSPE

SEQ ID NO: 134920 - protein, 9 aa, Homo sapiens
LKSGMSPEQ

SEQ ID NO: 134921 - protein, 9 aa, Homo sapiens
KSGMSPEQS

SEQ ID NO: 134922 - protein, 9 aa, Homo sapiens
SGMSPEQSR

SEQ ID NO: 134923 - protein, 9 aa, Homo sapiens
GMSPEQSRF

SEQ ID NO: 134924 - protein, 9 aa, Homo sapiens
MSPEQSRFQ

SEQ ID NO: 134925 - protein, 9 aa, Homo sapiens
SPEQSRFQS

SEQ ID NO: 134926 - protein, 9 aa, Homo sapiens
PEQSRFQSD

SEQ ID NO: 134927 - protein, 9 aa, Homo sapiens
EQSRFQSDS

SEQ ID NO: 134928 - protein, 9 aa, Homo sapiens
QSRFQSDSS

SEQ ID NO: 134929 - protein, 9 aa, Homo sapiens
SRFQSDSSS

SEQ ID NO: 134930 - protein, 9 aa, Homo sapiens
RFQSDSSSY

SEQ ID NO: 134931 - protein, 9 aa, Homo sapiens
FQSDSSSYP

SEQ ID NO: 134932 - protein, 9 aa, Homo sapiens
QSDSSSYPT

SEQ ID NO: 134933 - protein, 9 aa, Homo sapiens
SDSSSYPTV

SEQ ID NO: 134934 - protein, 9 aa, Homo sapiens
DSSSYPTVD

SEQ ID NO: 134935 - protein, 9 aa, Homo sapiens
SSSYPTVDS

SEQ ID NO: 134936 - protein, 9 aa, Homo sapiens
SSYPTVDSN

SEQ ID NO: 134937 - protein, 9 aa, Homo sapiens
SYPTVDSNS

SEQ ID NO: 134938 - protein, 9 aa, Homo sapiens
YPTVDSNSL

SEQ ID NO: 134939 - protein, 9 aa, Homo sapiens
PTVDSNSLL

SEQ ID NO: 134940 - protein, 9 aa, Homo sapiens
TVDSNSLLG

SEQ ID NO: 134941 - protein, 9 aa, Homo sapiens
VDSNSLLGQ

SEQ ID NO: 134942 - protein, 9 aa, Homo sapiens
DSNSLLGQS

SEQ ID NO: 134943 - protein, 9 aa, Homo sapiens
SNSLLGQSR

SEQ ID NO: 134944 - protein, 9 aa, Homo sapiens
NSLLGQSRL

SEQ ID NO: 134945 - protein, 9 aa, Homo sapiens
SLLGQSRLE

SEQ ID NO: 134946 - protein, 9 aa, Homo sapiens
LLGQSRLET

SEQ ID NO: 134947 - protein, 9 aa, Homo sapiens
LGQSRLETA

SEQ ID NO: 134948 - protein, 9 aa, Homo sapiens
GQSRLETAE

SEQ ID NO: 134949 - protein, 9 aa, Homo sapiens
QSRLETAES

SEQ ID NO: 134950 - protein, 9 aa, Homo sapiens
SRLETAESK

SEQ ID NO: 134951 - protein, 9 aa, Homo sapiens
RLETAESKE

SEQ ID NO: 134952 - protein, 9 aa, Homo sapiens
LETAESKEK

SEQ ID NO: 134953 - protein, 9 aa, Homo sapiens
ETAESKEKM

SEQ ID NO: 134954 - protein, 9 aa, Homo sapiens
TAESKEKMA

SEQ ID NO: 134955 - protein, 9 aa, Homo sapiens
AESKEKMAL

SEQ ID NO: 134956 - protein, 9 aa, Homo sapiens
ESKEKMALP

SEQ ID NO: 134957 - protein, 9 aa, Homo sapiens
SKEKMALPP

SEQ ID NO: 134958 - protein, 9 aa, Homo sapiens
KEKMALPPQ

SEQ ID NO: 134959 - protein, 9 aa, Homo sapiens
EKMALPPQE

SEQ ID NO: 134960 - protein, 9 aa, Homo sapiens
KMALPPQED

SEQ ID NO: 134961 - protein, 9 aa, Homo sapiens
MALPPQEDA

SEQ ID NO: 134962 - protein, 9 aa, Homo sapiens
ALPPQEDAT

SEQ ID NO: 134963 - protein, 9 aa, Homo sapiens
LPPQEDATA

SEQ ID NO: 134964 - protein, 9 aa, Homo sapiens
PPQEDATAS

SEQ ID NO: 134965 - protein, 9 aa, Homo sapiens
PQEDATASP

SEQ ID NO: 134966 - protein, 9 aa, Homo sapiens
QEDATASPP

SEQ ID NO: 134967 - protein, 9 aa, Homo sapiens
EDATASPPR

SEQ ID NO: 134968 - protein, 9 aa, Homo sapiens
DATASPPRQ

SEQ ID NO: 134969 - protein, 9 aa, Homo sapiens
ATASPPRQK

SEQ ID NO: 134970 - protein, 9 aa, Homo sapiens
TASPPRQKD

SEQ ID NO: 134971 - protein, 9 aa, Homo sapiens
ASPPRQKDK

SEQ ID NO: 134972 - protein, 9 aa, Homo sapiens
SPPRQKDKF

SEQ ID NO: 134973 - protein, 9 aa, Homo sapiens
PPRQKDKFS

SEQ ID NO: 134974 - protein, 9 aa, Homo sapiens
PRQKDKFSP

SEQ ID NO: 134975 - protein, 9 aa, Homo sapiens
RQKDKFSPF

SEQ ID NO: 134976 - protein, 9 aa, Homo sapiens
QKDKFSPFP

SEQ ID NO: 134977 - protein, 9 aa, Homo sapiens
KDKFSPFPV

SEQ ID NO: 134978 - protein, 9 aa, Homo sapiens
DKFSPFPVQ

SEQ ID NO: 134979 - protein, 9 aa, Homo sapiens
KFSPFPVQD

SEQ ID NO: 134980 - protein, 9 aa, Homo sapiens
FSPFPVQDR

SEQ ID NO: 134981 - protein, 9 aa, Homo sapiens
SPFPVQDRP

SEQ ID NO: 134982 - protein, 9 aa, Homo sapiens
PFPVQDRPE

SEQ ID NO: 134983 - protein, 9 aa, Homo sapiens
FPVQDRPES

SEQ ID NO: 134984 - protein, 9 aa, Homo sapiens
PVQDRPESS

SEQ ID NO: 134985 - protein, 9 aa, Homo sapiens
VQDRPESSL

SEQ ID NO: 134986 - protein, 9 aa, Homo sapiens
QDRPESSLV

SEQ ID NO: 134987 - protein, 9 aa, Homo sapiens
DRPESSLVF

SEQ ID NO: 134988 - protein, 9 aa, Homo sapiens
RPESSLVFK

SEQ ID NO: 134989 - protein, 9 aa, Homo sapiens
PESSLVFKD

SEQ ID NO: 134990 - protein, 9 aa, Homo sapiens
ESSLVFKDT

SEQ ID NO: 134991 - protein, 9 aa, Homo sapiens
SSLVFKDTL

SEQ ID NO: 134992 - protein, 9 aa, Homo sapiens
SLVFKDTLR

SEQ ID NO: 134993 - protein, 9 aa, Homo sapiens
LVFKDTLRT

SEQ ID NO: 134994 - protein, 9 aa, Homo sapiens
VFKDTLRTP

SEQ ID NO: 134995 - protein, 9 aa, Homo sapiens
FKDTLRTPP

SEQ ID NO: 134996 - protein, 9 aa, Homo sapiens
KDTLRTPPR

SEQ ID NO: 134997 - protein, 9 aa, Homo sapiens
DTLRTPPRE

SEQ ID NO: 134998 - protein, 9 aa, Homo sapiens
TLRTPPRER

SEQ ID NO: 134999 - protein, 9 aa, Homo sapiens
LRTPPRERS

SEQ ID NO: 135000 - protein, 9 aa, Homo sapiens
RTPPRERSG

SEQ ID NO: 135001 - protein, 9 aa, Homo sapiens
TPPRERSGA

SEQ ID NO: 135002 - protein, 9 aa, Homo sapiens
PPRERSGAG

SEQ ID NO: 135003 - protein, 9 aa, Homo sapiens
PRERSGAGS

SEQ ID NO: 135004 - protein, 9 aa, Homo sapiens
RERSGAGSS

SEQ ID NO: 135005 - protein, 9 aa, Homo sapiens
ERSGAGSSP

SEQ ID NO: 135006 - protein, 9 aa, Homo sapiens
RSGAGSSPE

SEQ ID NO: 135007 - protein, 9 aa, Homo sapiens
SGAGSSPET

SEQ ID NO: 135008 - protein, 9 aa, Homo sapiens
GAGSSPETK

SEQ ID NO: 135009 - protein, 9 aa, Homo sapiens
AGSSPETKE

SEQ ID NO: 135010 - protein, 9 aa, Homo sapiens
GSSPETKEQ

SEQ ID NO: 135011 - protein, 9 aa, Homo sapiens
SSPETKEQN

SEQ ID NO: 135012 - protein, 9 aa, Homo sapiens
SPETKEQNS

SEQ ID NO: 135013 - protein, 9 aa, Homo sapiens
PETKEQNSA

SEQ ID NO: 135014 - protein, 9 aa, Homo sapiens
ETKEQNSAL

SEQ ID NO: 135015 - protein, 9 aa, Homo sapiens
TKEQNSALP

SEQ ID NO: 135016 - protein, 9 aa, Homo sapiens
KEQNSALPT

SEQ ID NO: 135017 - protein, 9 aa, Homo sapiens
EQNSALPTS

SEQ ID NO: 135018 - protein, 9 aa, Homo sapiens
QNSALPTSS

SEQ ID NO: 135019 - protein, 9 aa, Homo sapiens
NSALPTSSQ

SEQ ID NO: 135020 - protein, 9 aa, Homo sapiens
SALPTSSQD

SEQ ID NO: 135021 - protein, 9 aa, Homo sapiens
ALPTSSQDE

SEQ ID NO: 135022 - protein, 9 aa, Homo sapiens
LPTSSQDEE

SEQ ID NO: 135023 - protein, 9 aa, Homo sapiens
PTSSQDEEL

SEQ ID NO: 135024 - protein, 9 aa, Homo sapiens
TSSQDEELM

SEQ ID NO: 135025 - protein, 9 aa, Homo sapiens
SSQDEELME

SEQ ID NO: 135026 - protein, 9 aa, Homo sapiens
SQDEELMEV

SEQ ID NO: 135027 - protein, 9 aa, Homo sapiens
QDEELMEVV

SEQ ID NO: 135028 - protein, 9 aa, Homo sapiens
DEELMEVVE

SEQ ID NO: 135029 - protein, 9 aa, Homo sapiens
EELMEVVEK

SEQ ID NO: 135030 - protein, 9 aa, Homo sapiens
ELMEVVEKS

SEQ ID NO: 135031 - protein, 9 aa, Homo sapiens
LMEVVEKSE

SEQ ID NO: 135032 - protein, 9 aa, Homo sapiens
MEVVEKSEE

SEQ ID NO: 135033 - protein, 9 aa, Homo sapiens
EVVEKSEEP

SEQ ID NO: 135034 - protein, 9 aa, Homo sapiens
VVEKSEEPA

SEQ ID NO: 135035 - protein, 9 aa, Homo sapiens
VEKSEEPAG

SEQ ID NO: 135036 - protein, 9 aa, Homo sapiens
EKSEEPAGQ

SEQ ID NO: 135037 - protein, 9 aa, Homo sapiens
KSEEPAGQI

SEQ ID NO: 135038 - protein, 9 aa, Homo sapiens
SEEPAGQIL

SEQ ID NO: 135039 - protein, 9 aa, Homo sapiens
EEPAGQILS

SEQ ID NO: 135040 - protein, 9 aa, Homo sapiens
EPAGQILSH

SEQ ID NO: 135041 - protein, 9 aa, Homo sapiens
PAGQILSHL

SEQ ID NO: 135042 - protein, 9 aa, Homo sapiens
AGQILSHLS

SEQ ID NO: 135043 - protein, 9 aa, Homo sapiens
GQILSHLSS

SEQ ID NO: 135044 - protein, 9 aa, Homo sapiens
QILSHLSSE

SEQ ID NO: 135045 - protein, 9 aa, Homo sapiens
ILSHLSSEL

SEQ ID NO: 135046 - protein, 9 aa, Homo sapiens
LSHLSSELK

SEQ ID NO: 135047 - protein, 9 aa, Homo sapiens
SHLSSELKE

SEQ ID NO: 135048 - protein, 9 aa, Homo sapiens
HLSSELKEM

SEQ ID NO: 135049 - protein, 9 aa, Homo sapiens
LSSELKEMS

SEQ ID NO: 135050 - protein, 9 aa, Homo sapiens
SSELKEMST

SEQ ID NO: 135051 - protein, 9 aa, Homo sapiens
SELKEMSTS

SEQ ID NO: 135052 - protein, 9 aa, Homo sapiens
ELKEMSTSN

SEQ ID NO: 135053 - protein, 9 aa, Homo sapiens
LKEMSTSNF

SEQ ID NO: 135054 - protein, 9 aa, Homo sapiens
KEMSTSNFE

SEQ ID NO: 135055 - protein, 9 aa, Homo sapiens
EMSTSNFES

SEQ ID NO: 135056 - protein, 9 aa, Homo sapiens
MSTSNFESS

SEQ ID NO: 135057 - protein, 9 aa, Homo sapiens
STSNFESSP

SEQ ID NO: 135058 - protein, 9 aa, Homo sapiens
TSNFESSPE

SEQ ID NO: 135059 - protein, 9 aa, Homo sapiens
SNFESSPEV

SEQ ID NO: 135060 - protein, 9 aa, Homo sapiens
NFESSPEVE

SEQ ID NO: 135061 - protein, 9 aa, Homo sapiens
FESSPEVEE

SEQ ID NO: 135062 - protein, 9 aa, Homo sapiens
ESSPEVEER

SEQ ID NO: 135063 - protein, 9 aa, Homo sapiens
SSPEVEERP

SEQ ID NO: 135064 - protein, 9 aa, Homo sapiens
SPEVEERPA

SEQ ID NO: 135065 - protein, 9 aa, Homo sapiens
PEVEERPAV

SEQ ID NO: 135066 - protein, 9 aa, Homo sapiens
EVEERPAVS

SEQ ID NO: 135067 - protein, 9 aa, Homo sapiens
VEERPAVSL

SEQ ID NO: 135068 - protein, 9 aa, Homo sapiens
EERPAVSLT

SEQ ID NO: 135069 - protein, 9 aa, Homo sapiens
ERPAVSLTL

SEQ ID NO: 135070 - protein, 9 aa, Homo sapiens
RPAVSLTLD

SEQ ID NO: 135071 - protein, 9 aa, Homo sapiens
PAVSLTLDQ

SEQ ID NO: 135072 - protein, 9 aa, Homo sapiens
AVSLTLDQS

SEQ ID NO: 135073 - protein, 9 aa, Homo sapiens
VSLTLDQSQ

SEQ ID NO: 135074 - protein, 9 aa, Homo sapiens
SLTLDQSQS

SEQ ID NO: 135075 - protein, 9 aa, Homo sapiens
LTLDQSQSQ

SEQ ID NO: 135076 - protein, 9 aa, Homo sapiens
TLDQSQSQA

SEQ ID NO: 135077 - protein, 9 aa, Homo sapiens
LDQSQSQAS

SEQ ID NO: 135078 - protein, 9 aa, Homo sapiens
DQSQSQASL

SEQ ID NO: 135079 - protein, 9 aa, Homo sapiens
QSQSQASLE

SEQ ID NO: 135080 - protein, 9 aa, Homo sapiens
SQSQASLEA

SEQ ID NO: 135081 - protein, 9 aa, Homo sapiens
QSQASLEAV

SEQ ID NO: 135082 - protein, 9 aa, Homo sapiens
SQASLEAVE

SEQ ID NO: 135083 - protein, 9 aa, Homo sapiens
QASLEAVEV

SEQ ID NO: 135084 - protein, 9 aa, Homo sapiens
ASLEAVEVP

SEQ ID NO: 135085 - protein, 9 aa, Homo sapiens
SLEAVEVPS

SEQ ID NO: 135086 - protein, 9 aa, Homo sapiens
LEAVEVPSM

SEQ ID NO: 135087 - protein, 9 aa, Homo sapiens
EAVEVPSMA

SEQ ID NO: 135088 - protein, 9 aa, Homo sapiens
AVEVPSMAS

SEQ ID NO: 135089 - protein, 9 aa, Homo sapiens
VEVPSMASS

SEQ ID NO: 135090 - protein, 9 aa, Homo sapiens
EVPSMASSW

SEQ ID NO: 135091 - protein, 9 aa, Homo sapiens
VPSMASSWG

SEQ ID NO: 135092 - protein, 9 aa, Homo sapiens
PSMASSWGG

SEQ ID NO: 135093 - protein, 9 aa, Homo sapiens
SMASSWGGP

SEQ ID NO: 135094 - protein, 9 aa, Homo sapiens
MASSWGGPH

SEQ ID NO: 135095 - protein, 9 aa, Homo sapiens
ASSWGGPHF

SEQ ID NO: 135096 - protein, 9 aa, Homo sapiens
SSWGGPHFS

SEQ ID NO: 135097 - protein, 9 aa, Homo sapiens
SWGGPHFSP

SEQ ID NO: 135098 - protein, 9 aa, Homo sapiens
WGGPHFSPE

SEQ ID NO: 135099 - protein, 9 aa, Homo sapiens
GGPHFSPEH

SEQ ID NO: 135100 - protein, 9 aa, Homo sapiens
GPHFSPEHK

SEQ ID NO: 135101 - protein, 9 aa, Homo sapiens
PHFSPEHKE

SEQ ID NO: 135102 - protein, 9 aa, Homo sapiens
HFSPEHKEL

SEQ ID NO: 135103 - protein, 9 aa, Homo sapiens
FSPEHKELS

SEQ ID NO: 135104 - protein, 9 aa, Homo sapiens
SPEHKELSN

SEQ ID NO: 135105 - protein, 9 aa, Homo sapiens
PEHKELSNS

SEQ ID NO: 135106 - protein, 9 aa, Homo sapiens
EHKELSNSP

SEQ ID NO: 135107 - protein, 9 aa, Homo sapiens
HKELSNSPL

SEQ ID NO: 135108 - protein, 9 aa, Homo sapiens
KELSNSPLR

SEQ ID NO: 135109 - protein, 9 aa, Homo sapiens
ELSNSPLRE

SEQ ID NO: 135110 - protein, 9 aa, Homo sapiens
LSNSPLREN

SEQ ID NO: 135111 - protein, 9 aa, Homo sapiens
SNSPLRENS

SEQ ID NO: 135112 - protein, 9 aa, Homo sapiens
NSPLRENSF

SEQ ID NO: 135113 - protein, 9 aa, Homo sapiens
SPLRENSFG

SEQ ID NO: 135114 - protein, 9 aa, Homo sapiens
PLRENSFGS

SEQ ID NO: 135115 - protein, 9 aa, Homo sapiens
LRENSFGSP

SEQ ID NO: 135116 - protein, 9 aa, Homo sapiens
RENSFGSPL

SEQ ID NO: 135117 - protein, 9 aa, Homo sapiens
ENSFGSPLE

SEQ ID NO: 135118 - protein, 9 aa, Homo sapiens
NSFGSPLEF

SEQ ID NO: 135119 - protein, 9 aa, Homo sapiens
SFGSPLEFR

SEQ ID NO: 135120 - protein, 9 aa, Homo sapiens
FGSPLEFRN

SEQ ID NO: 135121 - protein, 9 aa, Homo sapiens
GSPLEFRNS

SEQ ID NO: 135122 - protein, 9 aa, Homo sapiens
SPLEFRNSG

SEQ ID NO: 135123 - protein, 9 aa, Homo sapiens
PLEFRNSGP

SEQ ID NO: 135124 - protein, 9 aa, Homo sapiens
LEFRNSGPL

SEQ ID NO: 135125 - protein, 9 aa, Homo sapiens
EFRNSGPLG

SEQ ID NO: 135126 - protein, 9 aa, Homo sapiens
FRNSGPLGT

SEQ ID NO: 135127 - protein, 9 aa, Homo sapiens
RNSGPLGTE

SEQ ID NO: 135128 - protein, 9 aa, Homo sapiens
NSGPLGTEM

SEQ ID NO: 135129 - protein, 9 aa, Homo sapiens
SGPLGTEMN

SEQ ID NO: 135130 - protein, 9 aa, Homo sapiens
GPLGTEMNT

SEQ ID NO: 135131 - protein, 9 aa, Homo sapiens
PLGTEMNTG

SEQ ID NO: 135132 - protein, 9 aa, Homo sapiens
LGTEMNTGF

SEQ ID NO: 135133 - protein, 9 aa, Homo sapiens
GTEMNTGFS

SEQ ID NO: 135134 - protein, 9 aa, Homo sapiens
TEMNTGFSS

SEQ ID NO: 135135 - protein, 9 aa, Homo sapiens
EMNTGFSSE

SEQ ID NO: 135136 - protein, 9 aa, Homo sapiens
MNTGFSSEV

SEQ ID NO: 135137 - protein, 9 aa, Homo sapiens
NTGFSSEVK

SEQ ID NO: 135138 - protein, 9 aa, Homo sapiens
TGFSSEVKE

SEQ ID NO: 135139 - protein, 9 aa, Homo sapiens
GFSSEVKED

SEQ ID NO: 135140 - protein, 9 aa, Homo sapiens
FSSEVKEDL

SEQ ID NO: 135141 - protein, 9 aa, Homo sapiens
SSEVKEDLN

SEQ ID NO: 135142 - protein, 9 aa, Homo sapiens
SEVKEDLNG

SEQ ID NO: 135143 - protein, 9 aa, Homo sapiens
EVKEDLNGP

SEQ ID NO: 135144 - protein, 9 aa, Homo sapiens
VKEDLNGPF

SEQ ID NO: 135145 - protein, 9 aa, Homo sapiens
KEDLNGPFL

SEQ ID NO: 135146 - protein, 9 aa, Homo sapiens
EDLNGPFLN

SEQ ID NO: 135147 - protein, 9 aa, Homo sapiens
DLNGPFLNQ

SEQ ID NO: 135148 - protein, 9 aa, Homo sapiens
LNGPFLNQL

SEQ ID NO: 135149 - protein, 9 aa, Homo sapiens
NGPFLNQLE

SEQ ID NO: 135150 - protein, 9 aa, Homo sapiens
GPFLNQLET

SEQ ID NO: 135151 - protein, 9 aa, Homo sapiens
PFLNQLETD

SEQ ID NO: 135152 - protein, 9 aa, Homo sapiens
FLNQLETDP

SEQ ID NO: 135153 - protein, 9 aa, Homo sapiens
LNQLETDPS

SEQ ID NO: 135154 - protein, 9 aa, Homo sapiens
NQLETDPSL

SEQ ID NO: 135155 - protein, 9 aa, Homo sapiens
QLETDPSLD

SEQ ID NO: 135156 - protein, 9 aa, Homo sapiens
LETDPSLDM

SEQ ID NO: 135157 - protein, 9 aa, Homo sapiens
ETDPSLDMK

SEQ ID NO: 135158 - protein, 9 aa, Homo sapiens
TDPSLDMKE

SEQ ID NO: 135159 - protein, 9 aa, Homo sapiens
DPSLDMKEQ

SEQ ID NO: 135160 - protein, 9 aa, Homo sapiens
PSLDMKEQS

SEQ ID NO: 135161 - protein, 9 aa, Homo sapiens
SLDMKEQST

SEQ ID NO: 135162 - protein, 9 aa, Homo sapiens
LDMKEQSTR

SEQ ID NO: 135163 - protein, 9 aa, Homo sapiens
DMKEQSTRS

SEQ ID NO: 135164 - protein, 9 aa, Homo sapiens
MKEQSTRSS

SEQ ID NO: 135165 - protein, 9 aa, Homo sapiens
KEQSTRSSG

SEQ ID NO: 135166 - protein, 9 aa, Homo sapiens
EQSTRSSGH

SEQ ID NO: 135167 - protein, 9 aa, Homo sapiens
QSTRSSGHS

SEQ ID NO: 135168 - protein, 9 aa, Homo sapiens
STRSSGHSS

SEQ ID NO: 135169 - protein, 9 aa, Homo sapiens
TRSSGHSSS

SEQ ID NO: 135170 - protein, 9 aa, Homo sapiens
RSSGHSSSE

SEQ ID NO: 135171 - protein, 9 aa, Homo sapiens
SSGHSSSEL

SEQ ID NO: 135172 - protein, 9 aa, Homo sapiens
SGHSSSELS

SEQ ID NO: 135173 - protein, 9 aa, Homo sapiens
GHSSSELSP

SEQ ID NO: 135174 - protein, 9 aa, Homo sapiens
HSSSELSPD

SEQ ID NO: 135175 - protein, 9 aa, Homo sapiens
SSSELSPDA

SEQ ID NO: 135176 - protein, 9 aa, Homo sapiens
SSELSPDAV

SEQ ID NO: 135177 - protein, 9 aa, Homo sapiens
SELSPDAVE

SEQ ID NO: 135178 - protein, 9 aa, Homo sapiens
ELSPDAVEK

SEQ ID NO: 135179 - protein, 9 aa, Homo sapiens
LSPDAVEKA

SEQ ID NO: 135180 - protein, 9 aa, Homo sapiens
SPDAVEKAG

SEQ ID NO: 135181 - protein, 9 aa, Homo sapiens
PDAVEKAGM

SEQ ID NO: 135182 - protein, 9 aa, Homo sapiens
DAVEKAGMS

SEQ ID NO: 135183 - protein, 9 aa, Homo sapiens
AVEKAGMSS

SEQ ID NO: 135184 - protein, 9 aa, Homo sapiens
VEKAGMSSN

SEQ ID NO: 135185 - protein, 9 aa, Homo sapiens
EKAGMSSNQ

SEQ ID NO: 135186 - protein, 9 aa, Homo sapiens
KAGMSSNQS

SEQ ID NO: 135187 - protein, 9 aa, Homo sapiens
AGMSSNQSI

SEQ ID NO: 135188 - protein, 9 aa, Homo sapiens
GMSSNQSIS

SEQ ID NO: 135189 - protein, 9 aa, Homo sapiens
MSSNQSISS

SEQ ID NO: 135190 - protein, 9 aa, Homo sapiens
SSNQSISSP

SEQ ID NO: 135191 - protein, 9 aa, Homo sapiens
SNQSISSPV

SEQ ID NO: 135192 - protein, 9 aa, Homo sapiens
NQSISSPVL

SEQ ID NO: 135193 - protein, 9 aa, Homo sapiens
QSISSPVLD

SEQ ID NO: 135194 - protein, 9 aa, Homo sapiens
SISSPVLDA

SEQ ID NO: 135195 - protein, 9 aa, Homo sapiens
ISSPVLDAV

SEQ ID NO: 135196 - protein, 9 aa, Homo sapiens
SSPVLDAVP

SEQ ID NO: 135197 - protein, 9 aa, Homo sapiens
SPVLDAVPR

SEQ ID NO: 135198 - protein, 9 aa, Homo sapiens
PVLDAVPRT

SEQ ID NO: 135199 - protein, 9 aa, Homo sapiens
VLDAVPRTP

SEQ ID NO: 135200 - protein, 9 aa, Homo sapiens
LDAVPRTPS

SEQ ID NO: 135201 - protein, 9 aa, Homo sapiens
DAVPRTPSR

SEQ ID NO: 135202 - protein, 9 aa, Homo sapiens
AVPRTPSRE

SEQ ID NO: 135203 - protein, 9 aa, Homo sapiens
VPRTPSRER

SEQ ID NO: 135204 - protein, 9 aa, Homo sapiens
PRTPSRERS

SEQ ID NO: 135205 - protein, 9 aa, Homo sapiens
RTPSRERSS

SEQ ID NO: 135206 - protein, 9 aa, Homo sapiens
TPSRERSSS

SEQ ID NO: 135207 - protein, 9 aa, Homo sapiens
PSRERSSSA

SEQ ID NO: 135208 - protein, 9 aa, Homo sapiens
SRERSSSAS

SEQ ID NO: 135209 - protein, 9 aa, Homo sapiens
RERSSSASS

SEQ ID NO: 135210 - protein, 9 aa, Homo sapiens
ERSSSASSP

SEQ ID NO: 135211 - protein, 9 aa, Homo sapiens
RSSSASSPE

SEQ ID NO: 135212 - protein, 9 aa, Homo sapiens
SSSASSPEM

SEQ ID NO: 135213 - protein, 9 aa, Homo sapiens
SSASSPEMK

SEQ ID NO: 135214 - protein, 9 aa, Homo sapiens
SASSPEMKD

SEQ ID NO: 135215 - protein, 9 aa, Homo sapiens
ASSPEMKDG

SEQ ID NO: 135216 - protein, 9 aa, Homo sapiens
SSPEMKDGL

SEQ ID NO: 135217 - protein, 9 aa, Homo sapiens
SPEMKDGLP

SEQ ID NO: 135218 - protein, 9 aa, Homo sapiens
PEMKDGLPR

SEQ ID NO: 135219 - protein, 9 aa, Homo sapiens
EMKDGLPRT

SEQ ID NO: 135220 - protein, 9 aa, Homo sapiens
MKDGLPRTP

SEQ ID NO: 135221 - protein, 9 aa, Homo sapiens
KDGLPRTPS

SEQ ID NO: 135222 - protein, 9 aa, Homo sapiens
DGLPRTPSR

SEQ ID NO: 135223 - protein, 9 aa, Homo sapiens
GLPRTPSRR

SEQ ID NO: 135224 - protein, 9 aa, Homo sapiens
LPRTPSRRS

SEQ ID NO: 135225 - protein, 9 aa, Homo sapiens
PRTPSRRSR

SEQ ID NO: 135226 - protein, 9 aa, Homo sapiens
RTPSRRSRS

SEQ ID NO: 135227 - protein, 9 aa, Homo sapiens
TPSRRSRSG

SEQ ID NO: 135228 - protein, 9 aa, Homo sapiens
PSRRSRSGS

SEQ ID NO: 135229 - protein, 9 aa, Homo sapiens
SRRSRSGSS

SEQ ID NO: 135230 - protein, 9 aa, Homo sapiens
RRSRSGSSP

SEQ ID NO: 135231 - protein, 9 aa, Homo sapiens
RSRSGSSPG

SEQ ID NO: 135232 - protein, 9 aa, Homo sapiens
SRSGSSPGL

SEQ ID NO: 135233 - protein, 9 aa, Homo sapiens
RSGSSPGLR

SEQ ID NO: 135234 - protein, 9 aa, Homo sapiens
SGSSPGLRD

SEQ ID NO: 135235 - protein, 9 aa, Homo sapiens
GSSPGLRDG

SEQ ID NO: 135236 - protein, 9 aa, Homo sapiens
SSPGLRDGS

SEQ ID NO: 135237 - protein, 9 aa, Homo sapiens
SPGLRDGSG

SEQ ID NO: 135238 - protein, 9 aa, Homo sapiens
PGLRDGSGT

SEQ ID NO: 135239 - protein, 9 aa, Homo sapiens
GLRDGSGTP

SEQ ID NO: 135240 - protein, 9 aa, Homo sapiens
LRDGSGTPS

SEQ ID NO: 135241 - protein, 9 aa, Homo sapiens
RDGSGTPSR

SEQ ID NO: 135242 - protein, 9 aa, Homo sapiens
DGSGTPSRH

SEQ ID NO: 135243 - protein, 9 aa, Homo sapiens
GSGTPSRHS

SEQ ID NO: 135244 - protein, 9 aa, Homo sapiens
SGTPSRHSL

SEQ ID NO: 135245 - protein, 9 aa, Homo sapiens
GTPSRHSLS

SEQ ID NO: 135246 - protein, 9 aa, Homo sapiens
TPSRHSLSG

SEQ ID NO: 135247 - protein, 9 aa, Homo sapiens
PSRHSLSGS

SEQ ID NO: 135248 - protein, 9 aa, Homo sapiens
SRHSLSGSS

SEQ ID NO: 135249 - protein, 9 aa, Homo sapiens
RHSLSGSSP

SEQ ID NO: 135250 - protein, 9 aa, Homo sapiens
HSLSGSSPG

SEQ ID NO: 135251 - protein, 9 aa, Homo sapiens
SLSGSSPGM

SEQ ID NO: 135252 - protein, 9 aa, Homo sapiens
LSGSSPGMK

SEQ ID NO: 135253 - protein, 9 aa, Homo sapiens
SGSSPGMKD

SEQ ID NO: 135254 - protein, 9 aa, Homo sapiens
GSSPGMKDI

SEQ ID NO: 135255 - protein, 9 aa, Homo sapiens
SSPGMKDIP

SEQ ID NO: 135256 - protein, 9 aa, Homo sapiens
SPGMKDIPR

SEQ ID NO: 135257 - protein, 9 aa, Homo sapiens
PGMKDIPRT

SEQ ID NO: 135258 - protein, 9 aa, Homo sapiens
GMKDIPRTP

SEQ ID NO: 135259 - protein, 9 aa, Homo sapiens
MKDIPRTPF

SEQ ID NO: 135260 - protein, 9 aa, Homo sapiens
KDIPRTPFR

SEQ ID NO: 135261 - protein, 9 aa, Homo sapiens
DIPRTPFRG

SEQ ID NO: 135262 - protein, 9 aa, Homo sapiens
IPRTPFRGR

SEQ ID NO: 135263 - protein, 9 aa, Homo sapiens
PRTPFRGRS

SEQ ID NO: 135264 - protein, 9 aa, Homo sapiens
RTPFRGRSE

SEQ ID NO: 135265 - protein, 9 aa, Homo sapiens
TPFRGRSEC

SEQ ID NO: 135266 - protein, 9 aa, Homo sapiens
PFRGRSECD

SEQ ID NO: 135267 - protein, 9 aa, Homo sapiens
FRGRSECDS

SEQ ID NO: 135268 - protein, 9 aa, Homo sapiens
RGRSECDSS

SEQ ID NO: 135269 - protein, 9 aa, Homo sapiens
GRSECDSSP

SEQ ID NO: 135270 - protein, 9 aa, Homo sapiens
RSECDSSPE

SEQ ID NO: 135271 - protein, 9 aa, Homo sapiens
SECDSSPEP

SEQ ID NO: 135272 - protein, 9 aa, Homo sapiens
ECDSSPEPK

SEQ ID NO: 135273 - protein, 9 aa, Homo sapiens
CDSSPEPKA

SEQ ID NO: 135274 - protein, 9 aa, Homo sapiens
DSSPEPKAL

SEQ ID NO: 135275 - protein, 9 aa, Homo sapiens
SSPEPKALP

SEQ ID NO: 135276 - protein, 9 aa, Homo sapiens
SPEPKALPQ

SEQ ID NO: 135277 - protein, 9 aa, Homo sapiens
PEPKALPQT

SEQ ID NO: 135278 - protein, 9 aa, Homo sapiens
EPKALPQTP

SEQ ID NO: 135279 - protein, 9 aa, Homo sapiens
PKALPQTPR

SEQ ID NO: 135280 - protein, 9 aa, Homo sapiens
KALPQTPRP

SEQ ID NO: 135281 - protein, 9 aa, Homo sapiens
ALPQTPRPR

SEQ ID NO: 135282 - protein, 9 aa, Homo sapiens
LPQTPRPRS

SEQ ID NO: 135283 - protein, 9 aa, Homo sapiens
PQTPRPRSR

SEQ ID NO: 135284 - protein, 9 aa, Homo sapiens
QTPRPRSRS

SEQ ID NO: 135285 - protein, 9 aa, Homo sapiens
TPRPRSRSP

SEQ ID NO: 135286 - protein, 9 aa, Homo sapiens
PRPRSRSPS

SEQ ID NO: 135287 - protein, 9 aa, Homo sapiens
RPRSRSPSS

SEQ ID NO: 135288 - protein, 9 aa, Homo sapiens
PRSRSPSSP

SEQ ID NO: 135289 - protein, 9 aa, Homo sapiens
RSRSPSSPE

SEQ ID NO: 135290 - protein, 9 aa, Homo sapiens
SRSPSSPEL

SEQ ID NO: 135291 - protein, 9 aa, Homo sapiens
RSPSSPELN

SEQ ID NO: 135292 - protein, 9 aa, Homo sapiens
SPSSPELNN

SEQ ID NO: 135293 - protein, 9 aa, Homo sapiens
PSSPELNNK

SEQ ID NO: 135294 - protein, 9 aa, Homo sapiens
SSPELNNKC

SEQ ID NO: 135295 - protein, 9 aa, Homo sapiens
SPELNNKCL

SEQ ID NO: 135296 - protein, 9 aa, Homo sapiens
PELNNKCLT

SEQ ID NO: 135297 - protein, 9 aa, Homo sapiens
ELNNKCLTP

SEQ ID NO: 135298 - protein, 9 aa, Homo sapiens
LNNKCLTPQ

SEQ ID NO: 135299 - protein, 9 aa, Homo sapiens
NNKCLTPQR

SEQ ID NO: 135300 - protein, 9 aa, Homo sapiens
NKCLTPQRE

SEQ ID NO: 135301 - protein, 9 aa, Homo sapiens
KCLTPQRER

SEQ ID NO: 135302 - protein, 9 aa, Homo sapiens
CLTPQRERS

SEQ ID NO: 135303 - protein, 9 aa, Homo sapiens
LTPQRERSG

SEQ ID NO: 135304 - protein, 9 aa, Homo sapiens
TPQRERSGS

SEQ ID NO: 135305 - protein, 9 aa, Homo sapiens
PQRERSGSE

SEQ ID NO: 135306 - protein, 9 aa, Homo sapiens
QRERSGSES

SEQ ID NO: 135307 - protein, 9 aa, Homo sapiens
RERSGSESS

SEQ ID NO: 135308 - protein, 9 aa, Homo sapiens
ERSGSESSV

SEQ ID NO: 135309 - protein, 9 aa, Homo sapiens
RSGSESSVD

SEQ ID NO: 135310 - protein, 9 aa, Homo sapiens
SGSESSVDQ

SEQ ID NO: 135311 - protein, 9 aa, Homo sapiens
GSESSVDQK

SEQ ID NO: 135312 - protein, 9 aa, Homo sapiens
SESSVDQKT

SEQ ID NO: 135313 - protein, 9 aa, Homo sapiens
ESSVDQKTV

SEQ ID NO: 135314 - protein, 9 aa, Homo sapiens
SSVDQKTVA

SEQ ID NO: 135315 - protein, 9 aa, Homo sapiens
SVDQKTVAR

SEQ ID NO: 135316 - protein, 9 aa, Homo sapiens
VDQKTVART

SEQ ID NO: 135317 - protein, 9 aa, Homo sapiens
DQKTVARTP

SEQ ID NO: 135318 - protein, 9 aa, Homo sapiens
QKTVARTPL

SEQ ID NO: 135319 - protein, 9 aa, Homo sapiens
KTVARTPLG

SEQ ID NO: 135320 - protein, 9 aa, Homo sapiens
TVARTPLGQ

SEQ ID NO: 135321 - protein, 9 aa, Homo sapiens
VARTPLGQR

SEQ ID NO: 135322 - protein, 9 aa, Homo sapiens
ARTPLGQRS

SEQ ID NO: 135323 - protein, 9 aa, Homo sapiens
RTPLGQRSR

SEQ ID NO: 135324 - protein, 9 aa, Homo sapiens
TPLGQRSRS

SEQ ID NO: 135325 - protein, 9 aa, Homo sapiens
PLGQRSRSG

SEQ ID NO: 135326 - protein, 9 aa, Homo sapiens
LGQRSRSGS

SEQ ID NO: 135327 - protein, 9 aa, Homo sapiens
GQRSRSGSS

SEQ ID NO: 135328 - protein, 9 aa, Homo sapiens
QRSRSGSSQ

SEQ ID NO: 135329 - protein, 9 aa, Homo sapiens
RSRSGSSQE

SEQ ID NO: 135330 - protein, 9 aa, Homo sapiens
SRSGSSQEL

SEQ ID NO: 135331 - protein, 9 aa, Homo sapiens
RSGSSQELD

SEQ ID NO: 135332 - protein, 9 aa, Homo sapiens
SGSSQELDV

SEQ ID NO: 135333 - protein, 9 aa, Homo sapiens
GSSQELDVK

SEQ ID NO: 135334 - protein, 9 aa, Homo sapiens
SSQELDVKP

SEQ ID NO: 135335 - protein, 9 aa, Homo sapiens
SQELDVKPS

SEQ ID NO: 135336 - protein, 9 aa, Homo sapiens
QELDVKPSA

SEQ ID NO: 135337 - protein, 9 aa, Homo sapiens
ELDVKPSAS

SEQ ID NO: 135338 - protein, 9 aa, Homo sapiens
LDVKPSASP

SEQ ID NO: 135339 - protein, 9 aa, Homo sapiens
DVKPSASPQ

SEQ ID NO: 135340 - protein, 9 aa, Homo sapiens
VKPSASPQE

SEQ ID NO: 135341 - protein, 9 aa, Homo sapiens
KPSASPQER

SEQ ID NO: 135342 - protein, 9 aa, Homo sapiens
PSASPQERS

SEQ ID NO: 135343 - protein, 9 aa, Homo sapiens
SASPQERSE

SEQ ID NO: 135344 - protein, 9 aa, Homo sapiens
ASPQERSES

SEQ ID NO: 135345 - protein, 9 aa, Homo sapiens
SPQERSESD

SEQ ID NO: 135346 - protein, 9 aa, Homo sapiens
PQERSESDS

SEQ ID NO: 135347 - protein, 9 aa, Homo sapiens
QERSESDSS

SEQ ID NO: 135348 - protein, 9 aa, Homo sapiens
ERSESDSSP

SEQ ID NO: 135349 - protein, 9 aa, Homo sapiens
RSESDSSPD

SEQ ID NO: 135350 - protein, 9 aa, Homo sapiens
SESDSSPDS

SEQ ID NO: 135351 - protein, 9 aa, Homo sapiens
ESDSSPDSK

SEQ ID NO: 135352 - protein, 9 aa, Homo sapiens
SDSSPDSKA

SEQ ID NO: 135353 - protein, 9 aa, Homo sapiens
DSSPDSKAK

SEQ ID NO: 135354 - protein, 9 aa, Homo sapiens
SSPDSKAKT

SEQ ID NO: 135355 - protein, 9 aa, Homo sapiens
SPDSKAKTR

SEQ ID NO: 135356 - protein, 9 aa, Homo sapiens
PDSKAKTRT

SEQ ID NO: 135357 - protein, 9 aa, Homo sapiens
DSKAKTRTP

SEQ ID NO: 135358 - protein, 9 aa, Homo sapiens
SKAKTRTPL

SEQ ID NO: 135359 - protein, 9 aa, Homo sapiens
KAKTRTPLR

SEQ ID NO: 135360 - protein, 9 aa, Homo sapiens
AKTRTPLRQ

SEQ ID NO: 135361 - protein, 9 aa, Homo sapiens
KTRTPLRQR

SEQ ID NO: 135362 - protein, 9 aa, Homo sapiens
TRTPLRQRS

SEQ ID NO: 135363 - protein, 9 aa, Homo sapiens
RTPLRQRSR

SEQ ID NO: 135364 - protein, 9 aa, Homo sapiens
TPLRQRSRS

SEQ ID NO: 135365 - protein, 9 aa, Homo sapiens
PLRQRSRSG

SEQ ID NO: 135366 - protein, 9 aa, Homo sapiens
LRQRSRSGS

SEQ ID NO: 135367 - protein, 9 aa, Homo sapiens
RQRSRSGSS

SEQ ID NO: 135368 - protein, 9 aa, Homo sapiens
QRSRSGSSP

SEQ ID NO: 135369 - protein, 9 aa, Homo sapiens
RSRSGSSPE

SEQ ID NO: 135370 - protein, 9 aa, Homo sapiens
SRSGSSPEV

SEQ ID NO: 135371 - protein, 9 aa, Homo sapiens
RSGSSPEVD

SEQ ID NO: 135372 - protein, 9 aa, Homo sapiens
SGSSPEVDS

SEQ ID NO: 135373 - protein, 9 aa, Homo sapiens
GSSPEVDSK

SEQ ID NO: 135374 - protein, 9 aa, Homo sapiens
SSPEVDSKS

SEQ ID NO: 135375 - protein, 9 aa, Homo sapiens
SPEVDSKSR

SEQ ID NO: 135376 - protein, 9 aa, Homo sapiens
PEVDSKSRL

SEQ ID NO: 135377 - protein, 9 aa, Homo sapiens
EVDSKSRLS

SEQ ID NO: 135378 - protein, 9 aa, Homo sapiens
VDSKSRLSP

SEQ ID NO: 135379 - protein, 9 aa, Homo sapiens
DSKSRLSPR

SEQ ID NO: 135380 - protein, 9 aa, Homo sapiens
SKSRLSPRR

SEQ ID NO: 135381 - protein, 9 aa, Homo sapiens
KSRLSPRRS

SEQ ID NO: 135382 - protein, 9 aa, Homo sapiens
SRLSPRRSR

SEQ ID NO: 135383 - protein, 9 aa, Homo sapiens
RLSPRRSRS

SEQ ID NO: 135384 - protein, 9 aa, Homo sapiens
LSPRRSRSG

SEQ ID NO: 135385 - protein, 9 aa, Homo sapiens
SPRRSRSGS

SEQ ID NO: 135386 - protein, 9 aa, Homo sapiens
PRRSRSGSS

SEQ ID NO: 135387 - protein, 9 aa, Homo sapiens
RRSRSGSSP

SEQ ID NO: 135388 - protein, 9 aa, Homo sapiens
RSRSGSSPE

SEQ ID NO: 135389 - protein, 9 aa, Homo sapiens
SRSGSSPEV

SEQ ID NO: 135390 - protein, 9 aa, Homo sapiens
RSGSSPEVK

SEQ ID NO: 135391 - protein, 9 aa, Homo sapiens
SGSSPEVKD

SEQ ID NO: 135392 - protein, 9 aa, Homo sapiens
GSSPEVKDK

SEQ ID NO: 135393 - protein, 9 aa, Homo sapiens
SSPEVKDKP

SEQ ID NO: 135394 - protein, 9 aa, Homo sapiens
SPEVKDKPR

SEQ ID NO: 135395 - protein, 9 aa, Homo sapiens
PEVKDKPRA

SEQ ID NO: 135396 - protein, 9 aa, Homo sapiens
EVKDKPRAA

SEQ ID NO: 135397 - protein, 9 aa, Homo sapiens
VKDKPRAAP

SEQ ID NO: 135398 - protein, 9 aa, Homo sapiens
KDKPRAAPR

SEQ ID NO: 135399 - protein, 9 aa, Homo sapiens
DKPRAAPRA

SEQ ID NO: 135400 - protein, 9 aa, Homo sapiens
KPRAAPRAQ

SEQ ID NO: 135401 - protein, 9 aa, Homo sapiens
PRAAPRAQS

SEQ ID NO: 135402 - protein, 9 aa, Homo sapiens
RAAPRAQSG

SEQ ID NO: 135403 - protein, 9 aa, Homo sapiens
AAPRAQSGS

SEQ ID NO: 135404 - protein, 9 aa, Homo sapiens
APRAQSGSD

SEQ ID NO: 135405 - protein, 9 aa, Homo sapiens
PRAQSGSDS

SEQ ID NO: 135406 - protein, 9 aa, Homo sapiens
RAQSGSDSS

SEQ ID NO: 135407 - protein, 9 aa, Homo sapiens
AQSGSDSSP

SEQ ID NO: 135408 - protein, 9 aa, Homo sapiens
QSGSDSSPE

SEQ ID NO: 135409 - protein, 9 aa, Homo sapiens
SGSDSSPEP

SEQ ID NO: 135410 - protein, 9 aa, Homo sapiens
GSDSSPEPK

SEQ ID NO: 135411 - protein, 9 aa, Homo sapiens
SDSSPEPKA

SEQ ID NO: 135412 - protein, 9 aa, Homo sapiens
DSSPEPKAP

SEQ ID NO: 135413 - protein, 9 aa, Homo sapiens
SSPEPKAPA

SEQ ID NO: 135414 - protein, 9 aa, Homo sapiens
SPEPKAPAP

SEQ ID NO: 135415 - protein, 9 aa, Homo sapiens
PEPKAPAPR

SEQ ID NO: 135416 - protein, 9 aa, Homo sapiens
EPKAPAPRA

SEQ ID NO: 135417 - protein, 9 aa, Homo sapiens
PKAPAPRAL

SEQ ID NO: 135418 - protein, 9 aa, Homo sapiens
KAPAPRALP

SEQ ID NO: 135419 - protein, 9 aa, Homo sapiens
APAPRALPR

SEQ ID NO: 135420 - protein, 9 aa, Homo sapiens
PAPRALPRR

SEQ ID NO: 135421 - protein, 9 aa, Homo sapiens
APRALPRRS

SEQ ID NO: 135422 - protein, 9 aa, Homo sapiens
PRALPRRSR

SEQ ID NO: 135423 - protein, 9 aa, Homo sapiens
RALPRRSRS

SEQ ID NO: 135424 - protein, 9 aa, Homo sapiens
ALPRRSRSG

SEQ ID NO: 135425 - protein, 9 aa, Homo sapiens
LPRRSRSGS

SEQ ID NO: 135426 - protein, 9 aa, Homo sapiens
PRRSRSGSS

SEQ ID NO: 135427 - protein, 9 aa, Homo sapiens
RRSRSGSSS

SEQ ID NO: 135428 - protein, 9 aa, Homo sapiens
RSRSGSSSK

SEQ ID NO: 135429 - protein, 9 aa, Homo sapiens
SRSGSSSKG

SEQ ID NO: 135430 - protein, 9 aa, Homo sapiens
RSGSSSKGR

SEQ ID NO: 135431 - protein, 9 aa, Homo sapiens
SGSSSKGRG

SEQ ID NO: 135432 - protein, 9 aa, Homo sapiens
GSSSKGRGP

SEQ ID NO: 135433 - protein, 9 aa, Homo sapiens
SSSKGRGPS

SEQ ID NO: 135434 - protein, 9 aa, Homo sapiens
SSKGRGPSP

SEQ ID NO: 135435 - protein, 9 aa, Homo sapiens
SKGRGPSPE

SEQ ID NO: 135436 - protein, 9 aa, Homo sapiens
KGRGPSPEG

SEQ ID NO: 135437 - protein, 9 aa, Homo sapiens
GRGPSPEGS

SEQ ID NO: 135438 - protein, 9 aa, Homo sapiens
RGPSPEGSS

SEQ ID NO: 135439 - protein, 9 aa, Homo sapiens
GPSPEGSSS

SEQ ID NO: 135440 - protein, 9 aa, Homo sapiens
PSPEGSSST

SEQ ID NO: 135441 - protein, 9 aa, Homo sapiens
SPEGSSSTE

SEQ ID NO: 135442 - protein, 9 aa, Homo sapiens
PEGSSSTES

SEQ ID NO: 135443 - protein, 9 aa, Homo sapiens
EGSSSTESS

SEQ ID NO: 135444 - protein, 9 aa, Homo sapiens
GSSSTESSP

SEQ ID NO: 135445 - protein, 9 aa, Homo sapiens
SSSTESSPE

SEQ ID NO: 135446 - protein, 9 aa, Homo sapiens
SSTESSPEH

SEQ ID NO: 135447 - protein, 9 aa, Homo sapiens
STESSPEHP

SEQ ID NO: 135448 - protein, 9 aa, Homo sapiens
TESSPEHPP

SEQ ID NO: 135449 - protein, 9 aa, Homo sapiens
ESSPEHPPK

SEQ ID NO: 135450 - protein, 9 aa, Homo sapiens
SSPEHPPKS

SEQ ID NO: 135451 - protein, 9 aa, Homo sapiens
SPEHPPKSR

SEQ ID NO: 135452 - protein, 9 aa, Homo sapiens
PEHPPKSRT

SEQ ID NO: 135453 - protein, 9 aa, Homo sapiens
EHPPKSRTA

SEQ ID NO: 135454 - protein, 9 aa, Homo sapiens
HPPKSRTAR

SEQ ID NO: 135455 - protein, 9 aa, Homo sapiens
PPKSRTARR

SEQ ID NO: 135456 - protein, 9 aa, Homo sapiens
PKSRTARRG

SEQ ID NO: 135457 - protein, 9 aa, Homo sapiens
KSRTARRGS

SEQ ID NO: 135458 - protein, 9 aa, Homo sapiens
SRTARRGSR

SEQ ID NO: 135459 - protein, 9 aa, Homo sapiens
RTARRGSRS

SEQ ID NO: 135460 - protein, 9 aa, Homo sapiens
TARRGSRSS

SEQ ID NO: 135461 - protein, 9 aa, Homo sapiens
ARRGSRSSP

SEQ ID NO: 135462 - protein, 9 aa, Homo sapiens
RRGSRSSPE

SEQ ID NO: 135463 - protein, 9 aa, Homo sapiens
RGSRSSPEP

SEQ ID NO: 135464 - protein, 9 aa, Homo sapiens
GSRSSPEPK

SEQ ID NO: 135465 - protein, 9 aa, Homo sapiens
SRSSPEPKT

SEQ ID NO: 135466 - protein, 9 aa, Homo sapiens
RSSPEPKTK

SEQ ID NO: 135467 - protein, 9 aa, Homo sapiens
SSPEPKTKS

SEQ ID NO: 135468 - protein, 9 aa, Homo sapiens
SPEPKTKSR

SEQ ID NO: 135469 - protein, 9 aa, Homo sapiens
PEPKTKSRT

SEQ ID NO: 135470 - protein, 9 aa, Homo sapiens
EPKTKSRTP

SEQ ID NO: 135471 - protein, 9 aa, Homo sapiens
PKTKSRTPP

SEQ ID NO: 135472 - protein, 9 aa, Homo sapiens
KTKSRTPPR

SEQ ID NO: 135473 - protein, 9 aa, Homo sapiens
TKSRTPPRR

SEQ ID NO: 135474 - protein, 9 aa, Homo sapiens
KSRTPPRRR

SEQ ID NO: 135475 - protein, 9 aa, Homo sapiens
SRTPPRRRS

SEQ ID NO: 135476 - protein, 9 aa, Homo sapiens
RTPPRRRSS

SEQ ID NO: 135477 - protein, 9 aa, Homo sapiens
TPPRRRSSR

SEQ ID NO: 135478 - protein, 9 aa, Homo sapiens
PPRRRSSRS

SEQ ID NO: 135479 - protein, 9 aa, Homo sapiens
PRRRSSRSS

SEQ ID NO: 135480 - protein, 9 aa, Homo sapiens
RRRSSRSSP

SEQ ID NO: 135481 - protein, 9 aa, Homo sapiens
RRSSRSSPE

SEQ ID NO: 135482 - protein, 9 aa, Homo sapiens
RSSRSSPEL

SEQ ID NO: 135483 - protein, 9 aa, Homo sapiens
SSRSSPELT

SEQ ID NO: 135484 - protein, 9 aa, Homo sapiens
SRSSPELTR

SEQ ID NO: 135485 - protein, 9 aa, Homo sapiens
RSSPELTRK

SEQ ID NO: 135486 - protein, 9 aa, Homo sapiens
SSPELTRKA

SEQ ID NO: 135487 - protein, 9 aa, Homo sapiens
SPELTRKAR

SEQ ID NO: 135488 - protein, 9 aa, Homo sapiens
PELTRKARL

SEQ ID NO: 135489 - protein, 9 aa, Homo sapiens
ELTRKARLS

SEQ ID NO: 135490 - protein, 9 aa, Homo sapiens
LTRKARLSR

SEQ ID NO: 135491 - protein, 9 aa, Homo sapiens
TRKARLSRR

SEQ ID NO: 135492 - protein, 9 aa, Homo sapiens
RKARLSRRS

SEQ ID NO: 135493 - protein, 9 aa, Homo sapiens
KARLSRRSR

SEQ ID NO: 135494 - protein, 9 aa, Homo sapiens
ARLSRRSRS

SEQ ID NO: 135495 - protein, 9 aa, Homo sapiens
RLSRRSRSA

SEQ ID NO: 135496 - protein, 9 aa, Homo sapiens
LSRRSRSAS

SEQ ID NO: 135497 - protein, 9 aa, Homo sapiens
SRRSRSASS

SEQ ID NO: 135498 - protein, 9 aa, Homo sapiens
RRSRSASSS

SEQ ID NO: 135499 - protein, 9 aa, Homo sapiens
RSRSASSSP

SEQ ID NO: 135500 - protein, 9 aa, Homo sapiens
SRSASSSPE

SEQ ID NO: 135501 - protein, 9 aa, Homo sapiens
RSASSSPET

SEQ ID NO: 135502 - protein, 9 aa, Homo sapiens
SASSSPETR

SEQ ID NO: 135503 - protein, 9 aa, Homo sapiens
ASSSPETRS

SEQ ID NO: 135504 - protein, 9 aa, Homo sapiens
SSSPETRSR

SEQ ID NO: 135505 - protein, 9 aa, Homo sapiens
SSPETRSRT

SEQ ID NO: 135506 - protein, 9 aa, Homo sapiens
SPETRSRTP

SEQ ID NO: 135507 - protein, 9 aa, Homo sapiens
PETRSRTPP

SEQ ID NO: 135508 - protein, 9 aa, Homo sapiens
ETRSRTPPR

SEQ ID NO: 135509 - protein, 9 aa, Homo sapiens
TRSRTPPRH

SEQ ID NO: 135510 - protein, 9 aa, Homo sapiens
RSRTPPRHR

SEQ ID NO: 135511 - protein, 9 aa, Homo sapiens
SRTPPRHRR

SEQ ID NO: 135512 - protein, 9 aa, Homo sapiens
RTPPRHRRS

SEQ ID NO: 135513 - protein, 9 aa, Homo sapiens
TPPRHRRSP

SEQ ID NO: 135514 - protein, 9 aa, Homo sapiens
PPRHRRSPS

SEQ ID NO: 135515 - protein, 9 aa, Homo sapiens
PRHRRSPSV

SEQ ID NO: 135516 - protein, 9 aa, Homo sapiens
RHRRSPSVS

SEQ ID NO: 135517 - protein, 9 aa, Homo sapiens
HRRSPSVSS

SEQ ID NO: 135518 - protein, 9 aa, Homo sapiens
RRSPSVSSP

SEQ ID NO: 135519 - protein, 9 aa, Homo sapiens
RSPSVSSPE

SEQ ID NO: 135520 - protein, 9 aa, Homo sapiens
SPSVSSPEP

SEQ ID NO: 135521 - protein, 9 aa, Homo sapiens
PSVSSPEPA

SEQ ID NO: 135522 - protein, 9 aa, Homo sapiens
SVSSPEPAE

SEQ ID NO: 135523 - protein, 9 aa, Homo sapiens
VSSPEPAEK

SEQ ID NO: 135524 - protein, 9 aa, Homo sapiens
SSPEPAEKS

SEQ ID NO: 135525 - protein, 9 aa, Homo sapiens
SPEPAEKSR

SEQ ID NO: 135526 - protein, 9 aa, Homo sapiens
PEPAEKSRS

SEQ ID NO: 135527 - protein, 9 aa, Homo sapiens
EPAEKSRSS

SEQ ID NO: 135528 - protein, 9 aa, Homo sapiens
PAEKSRSSR

SEQ ID NO: 135529 - protein, 9 aa, Homo sapiens
AEKSRSSRR

SEQ ID NO: 135530 - protein, 9 aa, Homo sapiens
EKSRSSRRR

SEQ ID NO: 135531 - protein, 9 aa, Homo sapiens
KSRSSRRRR

SEQ ID NO: 135532 - protein, 9 aa, Homo sapiens
SRSSRRRRS

SEQ ID NO: 135533 - protein, 9 aa, Homo sapiens
RSSRRRRSA

SEQ ID NO: 135534 - protein, 9 aa, Homo sapiens
SSRRRRSAS

SEQ ID NO: 135535 - protein, 9 aa, Homo sapiens
SRRRRSASS

SEQ ID NO: 135536 - protein, 9 aa, Homo sapiens
RRRRSASSP

SEQ ID NO: 135537 - protein, 9 aa, Homo sapiens
RRRSASSPR

SEQ ID NO: 135538 - protein, 9 aa, Homo sapiens
RRSASSPRT

SEQ ID NO: 135539 - protein, 9 aa, Homo sapiens
RSASSPRTK

SEQ ID NO: 135540 - protein, 9 aa, Homo sapiens
SASSPRTKT

SEQ ID NO: 135541 - protein, 9 aa, Homo sapiens
ASSPRTKTT

SEQ ID NO: 135542 - protein, 9 aa, Homo sapiens
SSPRTKTTS

SEQ ID NO: 135543 - protein, 9 aa, Homo sapiens
SPRTKTTSR

SEQ ID NO: 135544 - protein, 9 aa, Homo sapiens
PRTKTTSRR

SEQ ID NO: 135545 - protein, 9 aa, Homo sapiens
RTKTTSRRG

SEQ ID NO: 135546 - protein, 9 aa, Homo sapiens
TKTTSRRGR

SEQ ID NO: 135547 - protein, 9 aa, Homo sapiens
KTTSRRGRS

SEQ ID NO: 135548 - protein, 9 aa, Homo sapiens
TTSRRGRSP

SEQ ID NO: 135549 - protein, 9 aa, Homo sapiens
TSRRGRSPS

SEQ ID NO: 135550 - protein, 9 aa, Homo sapiens
SRRGRSPSP

SEQ ID NO: 135551 - protein, 9 aa, Homo sapiens
RRGRSPSPK

SEQ ID NO: 135552 - protein, 9 aa, Homo sapiens
RGRSPSPKP

SEQ ID NO: 135553 - protein, 9 aa, Homo sapiens
GRSPSPKPR

SEQ ID NO: 135554 - protein, 9 aa, Homo sapiens
RSPSPKPRG

SEQ ID NO: 135555 - protein, 9 aa, Homo sapiens
SPSPKPRGL

SEQ ID NO: 135556 - protein, 9 aa, Homo sapiens
PSPKPRGLQ

SEQ ID NO: 135557 - protein, 9 aa, Homo sapiens
SPKPRGLQR

SEQ ID NO: 135558 - protein, 9 aa, Homo sapiens
PKPRGLQRS

SEQ ID NO: 135559 - protein, 9 aa, Homo sapiens
KPRGLQRSR

SEQ ID NO: 135560 - protein, 9 aa, Homo sapiens
PRGLQRSRS

SEQ ID NO: 135561 - protein, 9 aa, Homo sapiens
RGLQRSRSR

SEQ ID NO: 135562 - protein, 9 aa, Homo sapiens
GLQRSRSRS

SEQ ID NO: 135563 - protein, 9 aa, Homo sapiens
LQRSRSRSR

SEQ ID NO: 135564 - protein, 9 aa, Homo sapiens
QRSRSRSRR

SEQ ID NO: 135565 - protein, 9 aa, Homo sapiens
RSRSRSRRE

SEQ ID NO: 135566 - protein, 9 aa, Homo sapiens
SRSRSRREK

SEQ ID NO: 135567 - protein, 9 aa, Homo sapiens
RSRSRREKT

SEQ ID NO: 135568 - protein, 9 aa, Homo sapiens
SRSRREKTR

SEQ ID NO: 135569 - protein, 9 aa, Homo sapiens
RSRREKTRT

SEQ ID NO: 135570 - protein, 9 aa, Homo sapiens
SRREKTRTT

SEQ ID NO: 135571 - protein, 9 aa, Homo sapiens
RREKTRTTR

SEQ ID NO: 135572 - protein, 9 aa, Homo sapiens
REKTRTTRR

SEQ ID NO: 135573 - protein, 9 aa, Homo sapiens
EKTRTTRRR

SEQ ID NO: 135574 - protein, 9 aa, Homo sapiens
KTRTTRRRD

SEQ ID NO: 135575 - protein, 9 aa, Homo sapiens
TRTTRRRDR

SEQ ID NO: 135576 - protein, 9 aa, Homo sapiens
RTTRRRDRS

SEQ ID NO: 135577 - protein, 9 aa, Homo sapiens
TTRRRDRSG

SEQ ID NO: 135578 - protein, 9 aa, Homo sapiens
TRRRDRSGS

SEQ ID NO: 135579 - protein, 9 aa, Homo sapiens
RRRDRSGSS

SEQ ID NO: 135580 - protein, 9 aa, Homo sapiens
RRDRSGSSQ

SEQ ID NO: 135581 - protein, 9 aa, Homo sapiens
RDRSGSSQS

SEQ ID NO: 135582 - protein, 9 aa, Homo sapiens
DRSGSSQST

SEQ ID NO: 135583 - protein, 9 aa, Homo sapiens
RSGSSQSTS

SEQ ID NO: 135584 - protein, 9 aa, Homo sapiens
SGSSQSTSR

SEQ ID NO: 135585 - protein, 9 aa, Homo sapiens
GSSQSTSRR

SEQ ID NO: 135586 - protein, 9 aa, Homo sapiens
SSQSTSRRR

SEQ ID NO: 135587 - protein, 9 aa, Homo sapiens
SQSTSRRRQ

SEQ ID NO: 135588 - protein, 9 aa, Homo sapiens
QSTSRRRQR

SEQ ID NO: 135589 - protein, 9 aa, Homo sapiens
STSRRRQRS

SEQ ID NO: 135590 - protein, 9 aa, Homo sapiens
TSRRRQRSR

SEQ ID NO: 135591 - protein, 9 aa, Homo sapiens
SRRRQRSRS

SEQ ID NO: 135592 - protein, 9 aa, Homo sapiens
RRRQRSRSR

SEQ ID NO: 135593 - protein, 9 aa, Homo sapiens
RRQRSRSRS

SEQ ID NO: 135594 - protein, 9 aa, Homo sapiens
RQRSRSRSR

SEQ ID NO: 135595 - protein, 9 aa, Homo sapiens
QRSRSRSRV

SEQ ID NO: 135596 - protein, 9 aa, Homo sapiens
RSRSRSRVT

SEQ ID NO: 135597 - protein, 9 aa, Homo sapiens
SRSRSRVTR

SEQ ID NO: 135598 - protein, 9 aa, Homo sapiens
RSRSRVTRR

SEQ ID NO: 135599 - protein, 9 aa, Homo sapiens
SRSRVTRRR

SEQ ID NO: 135600 - protein, 9 aa, Homo sapiens
RSRVTRRRR

SEQ ID NO: 135601 - protein, 9 aa, Homo sapiens
SRVTRRRRG

SEQ ID NO: 135602 - protein, 9 aa, Homo sapiens
RVTRRRRGG

SEQ ID NO: 135603 - protein, 9 aa, Homo sapiens
VTRRRRGGS

SEQ ID NO: 135604 - protein, 9 aa, Homo sapiens
TRRRRGGSG

SEQ ID NO: 135605 - protein, 9 aa, Homo sapiens
RRRRGGSGY

SEQ ID NO: 135606 - protein, 9 aa, Homo sapiens
RRRGGSGYH

SEQ ID NO: 135607 - protein, 9 aa, Homo sapiens
RRGGSGYHS

SEQ ID NO: 135608 - protein, 9 aa, Homo sapiens
RGGSGYHSR

SEQ ID NO: 135609 - protein, 9 aa, Homo sapiens
GGSGYHSRS

SEQ ID NO: 135610 - protein, 9 aa, Homo sapiens
GSGYHSRSP

SEQ ID NO: 135611 - protein, 9 aa, Homo sapiens
SGYHSRSPA

SEQ ID NO: 135612 - protein, 9 aa, Homo sapiens
GYHSRSPAR

SEQ ID NO: 135613 - protein, 9 aa, Homo sapiens
YHSRSPARQ

SEQ ID NO: 135614 - protein, 9 aa, Homo sapiens
HSRSPARQE

SEQ ID NO: 135615 - protein, 9 aa, Homo sapiens
SRSPARQES

SEQ ID NO: 135616 - protein, 9 aa, Homo sapiens
RSPARQESS

SEQ ID NO: 135617 - protein, 9 aa, Homo sapiens
SPARQESSR

SEQ ID NO: 135618 - protein, 9 aa, Homo sapiens
PARQESSRT

SEQ ID NO: 135619 - protein, 9 aa, Homo sapiens
ARQESSRTS

SEQ ID NO: 135620 - protein, 9 aa, Homo sapiens
RQESSRTSS

SEQ ID NO: 135621 - protein, 9 aa, Homo sapiens
QESSRTSSR

SEQ ID NO: 135622 - protein, 9 aa, Homo sapiens
ESSRTSSRR

SEQ ID NO: 135623 - protein, 9 aa, Homo sapiens
SSRTSSRRR

SEQ ID NO: 135624 - protein, 9 aa, Homo sapiens
SRTSSRRRR

SEQ ID NO: 135625 - protein, 9 aa, Homo sapiens
RTSSRRRRG

SEQ ID NO: 135626 - protein, 9 aa, Homo sapiens
TSSRRRRGR

SEQ ID NO: 135627 - protein, 9 aa, Homo sapiens
SSRRRRGRS

SEQ ID NO: 135628 - protein, 9 aa, Homo sapiens
SRRRRGRSR

SEQ ID NO: 135629 - protein, 9 aa, Homo sapiens
RRRRGRSRT

SEQ ID NO: 135630 - protein, 9 aa, Homo sapiens
RRRGRSRTP

SEQ ID NO: 135631 - protein, 9 aa, Homo sapiens
RRGRSRTPP

SEQ ID NO: 135632 - protein, 9 aa, Homo sapiens
RGRSRTPPT

SEQ ID NO: 135633 - protein, 9 aa, Homo sapiens
GRSRTPPTS

SEQ ID NO: 135634 - protein, 9 aa, Homo sapiens
RSRTPPTSR

SEQ ID NO: 135635 - protein, 9 aa, Homo sapiens
SRTPPTSRK

SEQ ID NO: 135636 - protein, 9 aa, Homo sapiens
RTPPTSRKR

SEQ ID NO: 135637 - protein, 9 aa, Homo sapiens
TPPTSRKRS

SEQ ID NO: 135638 - protein, 9 aa, Homo sapiens
PPTSRKRSR

SEQ ID NO: 135639 - protein, 9 aa, Homo sapiens
PTSRKRSRS

SEQ ID NO: 135640 - protein, 9 aa, Homo sapiens
TSRKRSRSR

SEQ ID NO: 135641 - protein, 9 aa, Homo sapiens
SRKRSRSRT

SEQ ID NO: 135642 - protein, 9 aa, Homo sapiens
RKRSRSRTS

SEQ ID NO: 135643 - protein, 9 aa, Homo sapiens
KRSRSRTSP

SEQ ID NO: 135644 - protein, 9 aa, Homo sapiens
RSRSRTSPA

SEQ ID NO: 135645 - protein, 9 aa, Homo sapiens
SRSRTSPAP

SEQ ID NO: 135646 - protein, 9 aa, Homo sapiens
RSRTSPAPW

SEQ ID NO: 135647 - protein, 9 aa, Homo sapiens
SRTSPAPWK

SEQ ID NO: 135648 - protein, 9 aa, Homo sapiens
RTSPAPWKR

SEQ ID NO: 135649 - protein, 9 aa, Homo sapiens
TSPAPWKRS

SEQ ID NO: 135650 - protein, 9 aa, Homo sapiens
SPAPWKRSR

SEQ ID NO: 135651 - protein, 9 aa, Homo sapiens
PAPWKRSRS

SEQ ID NO: 135652 - protein, 9 aa, Homo sapiens
APWKRSRSR

SEQ ID NO: 135653 - protein, 9 aa, Homo sapiens
PWKRSRSRA

SEQ ID NO: 135654 - protein, 9 aa, Homo sapiens
WKRSRSRAS

SEQ ID NO: 135655 - protein, 9 aa, Homo sapiens
KRSRSRASP

SEQ ID NO: 135656 - protein, 9 aa, Homo sapiens
RSRSRASPA

SEQ ID NO: 135657 - protein, 9 aa, Homo sapiens
SRSRASPAT

SEQ ID NO: 135658 - protein, 9 aa, Homo sapiens
RSRASPATH

SEQ ID NO: 135659 - protein, 9 aa, Homo sapiens
SRASPATHR

SEQ ID NO: 135660 - protein, 9 aa, Homo sapiens
RASPATHRR

SEQ ID NO: 135661 - protein, 9 aa, Homo sapiens
ASPATHRRS

SEQ ID NO: 135662 - protein, 9 aa, Homo sapiens
SPATHRRSR

SEQ ID NO: 135663 - protein, 9 aa, Homo sapiens
PATHRRSRS

SEQ ID NO: 135664 - protein, 9 aa, Homo sapiens
ATHRRSRSR

SEQ ID NO: 135665 - protein, 9 aa, Homo sapiens
THRRSRSRT

SEQ ID NO: 135666 - protein, 9 aa, Homo sapiens
HRRSRSRTP

SEQ ID NO: 135667 - protein, 9 aa, Homo sapiens
RRSRSRTPL

SEQ ID NO: 135668 - protein, 9 aa, Homo sapiens
RSRSRTPLI

SEQ ID NO: 135669 - protein, 9 aa, Homo sapiens
SRSRTPLIS

SEQ ID NO: 135670 - protein, 9 aa, Homo sapiens
RSRTPLISR

SEQ ID NO: 135671 - protein, 9 aa, Homo sapiens
SRTPLISRR

SEQ ID NO: 135672 - protein, 9 aa, Homo sapiens
RTPLISRRR

SEQ ID NO: 135673 - protein, 9 aa, Homo sapiens
TPLISRRRS

SEQ ID NO: 135674 - protein, 9 aa, Homo sapiens
PLISRRRSR

SEQ ID NO: 135675 - protein, 9 aa, Homo sapiens
LISRRRSRS

SEQ ID NO: 135676 - protein, 9 aa, Homo sapiens
ISRRRSRSR

SEQ ID NO: 135677 - protein, 9 aa, Homo sapiens
SRRRSRSRT

SEQ ID NO: 135678 - protein, 9 aa, Homo sapiens
RRRSRSRTS

SEQ ID NO: 135679 - protein, 9 aa, Homo sapiens
RRSRSRTSP

SEQ ID NO: 135680 - protein, 9 aa, Homo sapiens
RSRSRTSPV

SEQ ID NO: 135681 - protein, 9 aa, Homo sapiens
SRSRTSPVS

SEQ ID NO: 135682 - protein, 9 aa, Homo sapiens
RSRTSPVSR

SEQ ID NO: 135683 - protein, 9 aa, Homo sapiens
SRTSPVSRR

SEQ ID NO: 135684 - protein, 9 aa, Homo sapiens
RTSPVSRRR

SEQ ID NO: 135685 - protein, 9 aa, Homo sapiens
TSPVSRRRS

SEQ ID NO: 135686 - protein, 9 aa, Homo sapiens
SPVSRRRSR

SEQ ID NO: 135687 - protein, 9 aa, Homo sapiens
PVSRRRSRS

SEQ ID NO: 135688 - protein, 9 aa, Homo sapiens
VSRRRSRSR

SEQ ID NO: 135689 - protein, 9 aa, Homo sapiens
SRRRSRSRT

SEQ ID NO: 135690 - protein, 9 aa, Homo sapiens
RRRSRSRTS

SEQ ID NO: 135691 - protein, 9 aa, Homo sapiens
RRSRSRTSV

SEQ ID NO: 135692 - protein, 9 aa, Homo sapiens
RSRSRTSVT

SEQ ID NO: 135693 - protein, 9 aa, Homo sapiens
SRSRTSVTR

SEQ ID NO: 135694 - protein, 9 aa, Homo sapiens
RSRTSVTRR

SEQ ID NO: 135695 - protein, 9 aa, Homo sapiens
SRTSVTRRR

SEQ ID NO: 135696 - protein, 9 aa, Homo sapiens
RTSVTRRRS

SEQ ID NO: 135697 - protein, 9 aa, Homo sapiens
TSVTRRRSR

SEQ ID NO: 135698 - protein, 9 aa, Homo sapiens
SVTRRRSRS

SEQ ID NO: 135699 - protein, 9 aa, Homo sapiens
VTRRRSRSR

SEQ ID NO: 135700 - protein, 9 aa, Homo sapiens
TRRRSRSRA

SEQ ID NO: 135701 - protein, 9 aa, Homo sapiens
RRRSRSRAS

SEQ ID NO: 135702 - protein, 9 aa, Homo sapiens
RRSRSRASP

SEQ ID NO: 135703 - protein, 9 aa, Homo sapiens
RSRSRASPV

SEQ ID NO: 135704 - protein, 9 aa, Homo sapiens
SRSRASPVS

SEQ ID NO: 135705 - protein, 9 aa, Homo sapiens
RSRASPVSR

SEQ ID NO: 135706 - protein, 9 aa, Homo sapiens
SRASPVSRR

SEQ ID NO: 135707 - protein, 9 aa, Homo sapiens
RASPVSRRR

SEQ ID NO: 135708 - protein, 9 aa, Homo sapiens
ASPVSRRRS

SEQ ID NO: 135709 - protein, 9 aa, Homo sapiens
SPVSRRRSR

SEQ ID NO: 135710 - protein, 9 aa, Homo sapiens
PVSRRRSRS

SEQ ID NO: 135711 - protein, 9 aa, Homo sapiens
VSRRRSRSR

SEQ ID NO: 135712 - protein, 9 aa, Homo sapiens
SRRRSRSRT

SEQ ID NO: 135713 - protein, 9 aa, Homo sapiens
RRRSRSRTP

SEQ ID NO: 135714 - protein, 9 aa, Homo sapiens
RRSRSRTPP

SEQ ID NO: 135715 - protein, 9 aa, Homo sapiens
RSRSRTPPV

SEQ ID NO: 135716 - protein, 9 aa, Homo sapiens
SRSRTPPVT

SEQ ID NO: 135717 - protein, 9 aa, Homo sapiens
RSRTPPVTR

SEQ ID NO: 135718 - protein, 9 aa, Homo sapiens
SRTPPVTRR

SEQ ID NO: 135719 - protein, 9 aa, Homo sapiens
RTPPVTRRR

SEQ ID NO: 135720 - protein, 9 aa, Homo sapiens
TPPVTRRRS

SEQ ID NO: 135721 - protein, 9 aa, Homo sapiens
PPVTRRRSR

SEQ ID NO: 135722 - protein, 9 aa, Homo sapiens
PVTRRRSRS

SEQ ID NO: 135723 - protein, 9 aa, Homo sapiens
VTRRRSRSR

SEQ ID NO: 135724 - protein, 9 aa, Homo sapiens
TRRRSRSRT

SEQ ID NO: 135725 - protein, 9 aa, Homo sapiens
RRRSRSRTP

SEQ ID NO: 135726 - protein, 9 aa, Homo sapiens
RRSRSRTPT

SEQ ID NO: 135727 - protein, 9 aa, Homo sapiens
RSRSRTPTT

SEQ ID NO: 135728 - protein, 9 aa, Homo sapiens
SRSRTPTTR

SEQ ID NO: 135729 - protein, 9 aa, Homo sapiens
RSRTPTTRR

SEQ ID NO: 135730 - protein, 9 aa, Homo sapiens
SRTPTTRRR

SEQ ID NO: 135731 - protein, 9 aa, Homo sapiens
RTPTTRRRS

SEQ ID NO: 135732 - protein, 9 aa, Homo sapiens
TPTTRRRSR

SEQ ID NO: 135733 - protein, 9 aa, Homo sapiens
PTTRRRSRS

SEQ ID NO: 135734 - protein, 9 aa, Homo sapiens
TTRRRSRSR

SEQ ID NO: 135735 - protein, 9 aa, Homo sapiens
TRRRSRSRT

SEQ ID NO: 135736 - protein, 9 aa, Homo sapiens
RRRSRSRTP

SEQ ID NO: 135737 - protein, 9 aa, Homo sapiens
RRSRSRTPP

SEQ ID NO: 135738 - protein, 9 aa, Homo sapiens
RSRSRTPPV

SEQ ID NO: 135739 - protein, 9 aa, Homo sapiens
SRSRTPPVT

SEQ ID NO: 135740 - protein, 9 aa, Homo sapiens
RSRTPPVTR

SEQ ID NO: 135741 - protein, 9 aa, Homo sapiens
SRTPPVTRR

SEQ ID NO: 135742 - protein, 9 aa, Homo sapiens
RTPPVTRRR

SEQ ID NO: 135743 - protein, 9 aa, Homo sapiens
TPPVTRRRS

SEQ ID NO: 135744 - protein, 9 aa, Homo sapiens
PPVTRRRSR

SEQ ID NO: 135745 - protein, 9 aa, Homo sapiens
PVTRRRSRS

SEQ ID NO: 135746 - protein, 9 aa, Homo sapiens
VTRRRSRSR

SEQ ID NO: 135747 - protein, 9 aa, Homo sapiens
TRRRSRSRT

SEQ ID NO: 135748 - protein, 9 aa, Homo sapiens
RRRSRSRTP

SEQ ID NO: 135749 - protein, 9 aa, Homo sapiens
RRSRSRTPP

SEQ ID NO: 135750 - protein, 9 aa, Homo sapiens
RSRSRTPPV

SEQ ID NO: 135751 - protein, 9 aa, Homo sapiens
SRSRTPPVT

SEQ ID NO: 135752 - protein, 9 aa, Homo sapiens
RSRTPPVTR

SEQ ID NO: 135753 - protein, 9 aa, Homo sapiens
SRTPPVTRR

SEQ ID NO: 135754 - protein, 9 aa, Homo sapiens
RTPPVTRRR

SEQ ID NO: 135755 - protein, 9 aa, Homo sapiens
TPPVTRRRS

SEQ ID NO: 135756 - protein, 9 aa, Homo sapiens
PPVTRRRSR

SEQ ID NO: 135757 - protein, 9 aa, Homo sapiens
PVTRRRSRS

SEQ ID NO: 135758 - protein, 9 aa, Homo sapiens
VTRRRSRSR

SEQ ID NO: 135759 - protein, 9 aa, Homo sapiens
TRRRSRSRT

SEQ ID NO: 135760 - protein, 9 aa, Homo sapiens
RRRSRSRTS

SEQ ID NO: 135761 - protein, 9 aa, Homo sapiens
RRSRSRTSP

SEQ ID NO: 135762 - protein, 9 aa, Homo sapiens
RSRSRTSPI

SEQ ID NO: 135763 - protein, 9 aa, Homo sapiens
SRSRTSPIT

SEQ ID NO: 135764 - protein, 9 aa, Homo sapiens
RSRTSPITR

SEQ ID NO: 135765 - protein, 9 aa, Homo sapiens
SRTSPITRR

SEQ ID NO: 135766 - protein, 9 aa, Homo sapiens
RTSPITRRR

SEQ ID NO: 135767 - protein, 9 aa, Homo sapiens
TSPITRRRS

SEQ ID NO: 135768 - protein, 9 aa, Homo sapiens
SPITRRRSR

SEQ ID NO: 135769 - protein, 9 aa, Homo sapiens
PITRRRSRS

SEQ ID NO: 135770 - protein, 9 aa, Homo sapiens
ITRRRSRSR

SEQ ID NO: 135771 - protein, 9 aa, Homo sapiens
TRRRSRSRT

SEQ ID NO: 135772 - protein, 9 aa, Homo sapiens
RRRSRSRTS

SEQ ID NO: 135773 - protein, 9 aa, Homo sapiens
RRSRSRTSP

SEQ ID NO: 135774 - protein, 9 aa, Homo sapiens
RSRSRTSPV

SEQ ID NO: 135775 - protein, 9 aa, Homo sapiens
SRSRTSPVT

SEQ ID NO: 135776 - protein, 9 aa, Homo sapiens
RSRTSPVTR

SEQ ID NO: 135777 - protein, 9 aa, Homo sapiens
SRTSPVTRR

SEQ ID NO: 135778 - protein, 9 aa, Homo sapiens
RTSPVTRRR

SEQ ID NO: 135779 - protein, 9 aa, Homo sapiens
TSPVTRRRS

SEQ ID NO: 135780 - protein, 9 aa, Homo sapiens
SPVTRRRSR

SEQ ID NO: 135781 - protein, 9 aa, Homo sapiens
PVTRRRSRS

SEQ ID NO: 135782 - protein, 9 aa, Homo sapiens
VTRRRSRSR

SEQ ID NO: 135783 - protein, 9 aa, Homo sapiens
TRRRSRSRT

SEQ ID NO: 135784 - protein, 9 aa, Homo sapiens
RRRSRSRTS

SEQ ID NO: 135785 - protein, 9 aa, Homo sapiens
RRSRSRTSP

SEQ ID NO: 135786 - protein, 9 aa, Homo sapiens
RSRSRTSPV

SEQ ID NO: 135787 - protein, 9 aa, Homo sapiens
SRSRTSPVT

SEQ ID NO: 135788 - protein, 9 aa, Homo sapiens
RSRTSPVTR

SEQ ID NO: 135789 - protein, 9 aa, Homo sapiens
SRTSPVTRR

SEQ ID NO: 135790 - protein, 9 aa, Homo sapiens
RTSPVTRRR

SEQ ID NO: 135791 - protein, 9 aa, Homo sapiens
TSPVTRRRS

SEQ ID NO: 135792 - protein, 9 aa, Homo sapiens
SPVTRRRSR

SEQ ID NO: 135793 - protein, 9 aa, Homo sapiens
PVTRRRSRS

SEQ ID NO: 135794 - protein, 9 aa, Homo sapiens
VTRRRSRSR

SEQ ID NO: 135795 - protein, 9 aa, Homo sapiens
TRRRSRSRT

SEQ ID NO: 135796 - protein, 9 aa, Homo sapiens
RRRSRSRTS

SEQ ID NO: 135797 - protein, 9 aa, Homo sapiens
RRSRSRTSP

SEQ ID NO: 135798 - protein, 9 aa, Homo sapiens
RSRSRTSPV

SEQ ID NO: 135799 - protein, 9 aa, Homo sapiens
SRSRTSPVT

SEQ ID NO: 135800 - protein, 9 aa, Homo sapiens
RSRTSPVTR

SEQ ID NO: 135801 - protein, 9 aa, Homo sapiens
SRTSPVTRR

SEQ ID NO: 135802 - protein, 9 aa, Homo sapiens
RTSPVTRRR

SEQ ID NO: 135803 - protein, 9 aa, Homo sapiens
TSPVTRRRS

SEQ ID NO: 135804 - protein, 9 aa, Homo sapiens
SPVTRRRSR

SEQ ID NO: 135805 - protein, 9 aa, Homo sapiens
PVTRRRSRS

SEQ ID NO: 135806 - protein, 9 aa, Homo sapiens
VTRRRSRSR

SEQ ID NO: 135807 - protein, 9 aa, Homo sapiens
TRRRSRSRT

SEQ ID NO: 135808 - protein, 9 aa, Homo sapiens
RRRSRSRTP

SEQ ID NO: 135809 - protein, 9 aa, Homo sapiens
RRSRSRTPP

SEQ ID NO: 135810 - protein, 9 aa, Homo sapiens
RSRSRTPPA

SEQ ID NO: 135811 - protein, 9 aa, Homo sapiens
SRSRTPPAI

SEQ ID NO: 135812 - protein, 9 aa, Homo sapiens
RSRTPPAIR

SEQ ID NO: 135813 - protein, 9 aa, Homo sapiens
SRTPPAIRR

SEQ ID NO: 135814 - protein, 9 aa, Homo sapiens
RTPPAIRRR

SEQ ID NO: 135815 - protein, 9 aa, Homo sapiens
TPPAIRRRS

SEQ ID NO: 135816 - protein, 9 aa, Homo sapiens
PPAIRRRSR

SEQ ID NO: 135817 - protein, 9 aa, Homo sapiens
PAIRRRSRS

SEQ ID NO: 135818 - protein, 9 aa, Homo sapiens
AIRRRSRSR

SEQ ID NO: 135819 - protein, 9 aa, Homo sapiens
IRRRSRSRT

SEQ ID NO: 135820 - protein, 9 aa, Homo sapiens
RRRSRSRTP

SEQ ID NO: 135821 - protein, 9 aa, Homo sapiens
RRSRSRTPL

SEQ ID NO: 135822 - protein, 9 aa, Homo sapiens
RSRSRTPLL

SEQ ID NO: 135823 - protein, 9 aa, Homo sapiens
SRSRTPLLP

SEQ ID NO: 135824 - protein, 9 aa, Homo sapiens
RSRTPLLPR

SEQ ID NO: 135825 - protein, 9 aa, Homo sapiens
SRTPLLPRK

SEQ ID NO: 135826 - protein, 9 aa, Homo sapiens
RTPLLPRKR

SEQ ID NO: 135827 - protein, 9 aa, Homo sapiens
TPLLPRKRS

SEQ ID NO: 135828 - protein, 9 aa, Homo sapiens
PLLPRKRSR

SEQ ID NO: 135829 - protein, 9 aa, Homo sapiens
LLPRKRSRS

SEQ ID NO: 135830 - protein, 9 aa, Homo sapiens
LPRKRSRSR

SEQ ID NO: 135831 - protein, 9 aa, Homo sapiens
PRKRSRSRS

SEQ ID NO: 135832 - protein, 9 aa, Homo sapiens
RKRSRSRSP

SEQ ID NO: 135833 - protein, 9 aa, Homo sapiens
KRSRSRSPL

SEQ ID NO: 135834 - protein, 9 aa, Homo sapiens
RSRSRSPLA

SEQ ID NO: 135835 - protein, 9 aa, Homo sapiens
SRSRSPLAI

SEQ ID NO: 135836 - protein, 9 aa, Homo sapiens
RSRSPLAIR

SEQ ID NO: 135837 - protein, 9 aa, Homo sapiens
SRSPLAIRR

SEQ ID NO: 135838 - protein, 9 aa, Homo sapiens
RSPLAIRRR

SEQ ID NO: 135839 - protein, 9 aa, Homo sapiens
SPLAIRRRS

SEQ ID NO: 135840 - protein, 9 aa, Homo sapiens
PLAIRRRSR

SEQ ID NO: 135841 - protein, 9 aa, Homo sapiens
LAIRRRSRS

SEQ ID NO: 135842 - protein, 9 aa, Homo sapiens
AIRRRSRSR

SEQ ID NO: 135843 - protein, 9 aa, Homo sapiens
IRRRSRSRT

SEQ ID NO: 135844 - protein, 9 aa, Homo sapiens
RRRSRSRTP

SEQ ID NO: 135845 - protein, 9 aa, Homo sapiens
RRSRSRTPR

SEQ ID NO: 135846 - protein, 9 aa, Homo sapiens
RSRSRTPRT

SEQ ID NO: 135847 - protein, 9 aa, Homo sapiens
SRSRTPRTA

SEQ ID NO: 135848 - protein, 9 aa, Homo sapiens
RSRTPRTAR

SEQ ID NO: 135849 - protein, 9 aa, Homo sapiens
SRTPRTARG

SEQ ID NO: 135850 - protein, 9 aa, Homo sapiens
RTPRTARGK

SEQ ID NO: 135851 - protein, 9 aa, Homo sapiens
TPRTARGKR

SEQ ID NO: 135852 - protein, 9 aa, Homo sapiens
PRTARGKRS

SEQ ID NO: 135853 - protein, 9 aa, Homo sapiens
RTARGKRSL

SEQ ID NO: 135854 - protein, 9 aa, Homo sapiens
TARGKRSLT

SEQ ID NO: 135855 - protein, 9 aa, Homo sapiens
ARGKRSLTR

SEQ ID NO: 135856 - protein, 9 aa, Homo sapiens
RGKRSLTRS

SEQ ID NO: 135857 - protein, 9 aa, Homo sapiens
GKRSLTRSP

SEQ ID NO: 135858 - protein, 9 aa, Homo sapiens
KRSLTRSPP

SEQ ID NO: 135859 - protein, 9 aa, Homo sapiens
RSLTRSPPA

SEQ ID NO: 135860 - protein, 9 aa, Homo sapiens
SLTRSPPAI

SEQ ID NO: 135861 - protein, 9 aa, Homo sapiens
LTRSPPAIR

SEQ ID NO: 135862 - protein, 9 aa, Homo sapiens
TRSPPAIRR

SEQ ID NO: 135863 - protein, 9 aa, Homo sapiens
RSPPAIRRR

SEQ ID NO: 135864 - protein, 9 aa, Homo sapiens
SPPAIRRRS

SEQ ID NO: 135865 - protein, 9 aa, Homo sapiens
PPAIRRRSA

SEQ ID NO: 135866 - protein, 9 aa, Homo sapiens
PAIRRRSAS

SEQ ID NO: 135867 - protein, 9 aa, Homo sapiens
AIRRRSASG

SEQ ID NO: 135868 - protein, 9 aa, Homo sapiens
IRRRSASGS

SEQ ID NO: 135869 - protein, 9 aa, Homo sapiens
RRRSASGSS

SEQ ID NO: 135870 - protein, 9 aa, Homo sapiens
RRSASGSSS

SEQ ID NO: 135871 - protein, 9 aa, Homo sapiens
RSASGSSSD

SEQ ID NO: 135872 - protein, 9 aa, Homo sapiens
SASGSSSDR

SEQ ID NO: 135873 - protein, 9 aa, Homo sapiens
ASGSSSDRS

SEQ ID NO: 135874 - protein, 9 aa, Homo sapiens
SGSSSDRSR

SEQ ID NO: 135875 - protein, 9 aa, Homo sapiens
GSSSDRSRS

SEQ ID NO: 135876 - protein, 9 aa, Homo sapiens
SSSDRSRSA

SEQ ID NO: 135877 - protein, 9 aa, Homo sapiens
SSDRSRSAT

SEQ ID NO: 135878 - protein, 9 aa, Homo sapiens
SDRSRSATP

SEQ ID NO: 135879 - protein, 9 aa, Homo sapiens
DRSRSATPP

SEQ ID NO: 135880 - protein, 9 aa, Homo sapiens
RSRSATPPA

SEQ ID NO: 135881 - protein, 9 aa, Homo sapiens
SRSATPPAT

SEQ ID NO: 135882 - protein, 9 aa, Homo sapiens
RSATPPATR

SEQ ID NO: 135883 - protein, 9 aa, Homo sapiens
SATPPATRN

SEQ ID NO: 135884 - protein, 9 aa, Homo sapiens
ATPPATRNH

SEQ ID NO: 135885 - protein, 9 aa, Homo sapiens
TPPATRNHS

SEQ ID NO: 135886 - protein, 9 aa, Homo sapiens
PPATRNHSG

SEQ ID NO: 135887 - protein, 9 aa, Homo sapiens
PATRNHSGS

SEQ ID NO: 135888 - protein, 9 aa, Homo sapiens
ATRNHSGSR

SEQ ID NO: 135889 - protein, 9 aa, Homo sapiens
TRNHSGSRT

SEQ ID NO: 135890 - protein, 9 aa, Homo sapiens
RNHSGSRTP

SEQ ID NO: 135891 - protein, 9 aa, Homo sapiens
NHSGSRTPP

SEQ ID NO: 135892 - protein, 9 aa, Homo sapiens
HSGSRTPPV

SEQ ID NO: 135893 - protein, 9 aa, Homo sapiens
SGSRTPPVA

SEQ ID NO: 135894 - protein, 9 aa, Homo sapiens
GSRTPPVAL

SEQ ID NO: 135895 - protein, 9 aa, Homo sapiens
SRTPPVALN

SEQ ID NO: 135896 - protein, 9 aa, Homo sapiens
RTPPVALNS

SEQ ID NO: 135897 - protein, 9 aa, Homo sapiens
TPPVALNSS

SEQ ID NO: 135898 - protein, 9 aa, Homo sapiens
PPVALNSSR

SEQ ID NO: 135899 - protein, 9 aa, Homo sapiens
PVALNSSRM

SEQ ID NO: 135900 - protein, 9 aa, Homo sapiens
VALNSSRMS

SEQ ID NO: 135901 - protein, 9 aa, Homo sapiens
ALNSSRMSC

SEQ ID NO: 135902 - protein, 9 aa, Homo sapiens
LNSSRMSCF

SEQ ID NO: 135903 - protein, 9 aa, Homo sapiens
NSSRMSCFS

SEQ ID NO: 135904 - protein, 9 aa, Homo sapiens
SSRMSCFSR

SEQ ID NO: 135905 - protein, 9 aa, Homo sapiens
SRMSCFSRP

SEQ ID NO: 135906 - protein, 9 aa, Homo sapiens
RMSCFSRPS

SEQ ID NO: 135907 - protein, 9 aa, Homo sapiens
MSCFSRPSM

SEQ ID NO: 135908 - protein, 9 aa, Homo sapiens
SCFSRPSMS

SEQ ID NO: 135909 - protein, 9 aa, Homo sapiens
CFSRPSMSP

SEQ ID NO: 135910 - protein, 9 aa, Homo sapiens
FSRPSMSPT

SEQ ID NO: 135911 - protein, 9 aa, Homo sapiens
SRPSMSPTP

SEQ ID NO: 135912 - protein, 9 aa, Homo sapiens
RPSMSPTPL

SEQ ID NO: 135913 - protein, 9 aa, Homo sapiens
PSMSPTPLD

SEQ ID NO: 135914 - protein, 9 aa, Homo sapiens
SMSPTPLDR

SEQ ID NO: 135915 - protein, 9 aa, Homo sapiens
MSPTPLDRC

SEQ ID NO: 135916 - protein, 9 aa, Homo sapiens
SPTPLDRCR

SEQ ID NO: 135917 - protein, 9 aa, Homo sapiens
PTPLDRCRS

SEQ ID NO: 135918 - protein, 9 aa, Homo sapiens
TPLDRCRSP

SEQ ID NO: 135919 - protein, 9 aa, Homo sapiens
PLDRCRSPG

SEQ ID NO: 135920 - protein, 9 aa, Homo sapiens
LDRCRSPGM

SEQ ID NO: 135921 - protein, 9 aa, Homo sapiens
DRCRSPGML

SEQ ID NO: 135922 - protein, 9 aa, Homo sapiens
RCRSPGMLE

SEQ ID NO: 135923 - protein, 9 aa, Homo sapiens
CRSPGMLEP

SEQ ID NO: 135924 - protein, 9 aa, Homo sapiens
RSPGMLEPL

SEQ ID NO: 135925 - protein, 9 aa, Homo sapiens
SPGMLEPLG

SEQ ID NO: 135926 - protein, 9 aa, Homo sapiens
PGMLEPLGS

SEQ ID NO: 135927 - protein, 9 aa, Homo sapiens
GMLEPLGSS

SEQ ID NO: 135928 - protein, 9 aa, Homo sapiens
MLEPLGSSR

SEQ ID NO: 135929 - protein, 9 aa, Homo sapiens
LEPLGSSRT

SEQ ID NO: 135930 - protein, 9 aa, Homo sapiens
EPLGSSRTP

SEQ ID NO: 135931 - protein, 9 aa, Homo sapiens
PLGSSRTPM

SEQ ID NO: 135932 - protein, 9 aa, Homo sapiens
LGSSRTPMS

SEQ ID NO: 135933 - protein, 9 aa, Homo sapiens
GSSRTPMSV

SEQ ID NO: 135934 - protein, 9 aa, Homo sapiens
SSRTPMSVL

SEQ ID NO: 135935 - protein, 9 aa, Homo sapiens
SRTPMSVLQ

SEQ ID NO: 135936 - protein, 9 aa, Homo sapiens
RTPMSVLQQ

SEQ ID NO: 135937 - protein, 9 aa, Homo sapiens
TPMSVLQQA

SEQ ID NO: 135938 - protein, 9 aa, Homo sapiens
PMSVLQQAG

SEQ ID NO: 135939 - protein, 9 aa, Homo sapiens
MSVLQQAGG

SEQ ID NO: 135940 - protein, 9 aa, Homo sapiens
SVLQQAGGS

SEQ ID NO: 135941 - protein, 9 aa, Homo sapiens
VLQQAGGSM

SEQ ID NO: 135942 - protein, 9 aa, Homo sapiens
LQQAGGSMM

SEQ ID NO: 135943 - protein, 9 aa, Homo sapiens
QQAGGSMMD

SEQ ID NO: 135944 - protein, 9 aa, Homo sapiens
QAGGSMMDG

SEQ ID NO: 135945 - protein, 9 aa, Homo sapiens
AGGSMMDGP

SEQ ID NO: 135946 - protein, 9 aa, Homo sapiens
GGSMMDGPG

SEQ ID NO: 135947 - protein, 9 aa, Homo sapiens
GSMMDGPGP

SEQ ID NO: 135948 - protein, 9 aa, Homo sapiens
SMMDGPGPR

SEQ ID NO: 135949 - protein, 9 aa, Homo sapiens
MMDGPGPRI

SEQ ID NO: 135950 - protein, 9 aa, Homo sapiens
MDGPGPRIP

SEQ ID NO: 135951 - protein, 9 aa, Homo sapiens
DGPGPRIPD

SEQ ID NO: 135952 - protein, 9 aa, Homo sapiens
GPGPRIPDH

SEQ ID NO: 135953 - protein, 9 aa, Homo sapiens
PGPRIPDHQ

SEQ ID NO: 135954 - protein, 9 aa, Homo sapiens
GPRIPDHQR

SEQ ID NO: 135955 - protein, 9 aa, Homo sapiens
PRIPDHQRT

SEQ ID NO: 135956 - protein, 9 aa, Homo sapiens
RIPDHQRTS

SEQ ID NO: 135957 - protein, 9 aa, Homo sapiens
IPDHQRTSV

SEQ ID NO: 135958 - protein, 9 aa, Homo sapiens
PDHQRTSVP

SEQ ID NO: 135959 - protein, 9 aa, Homo sapiens
DHQRTSVPE

SEQ ID NO: 135960 - protein, 9 aa, Homo sapiens
HQRTSVPEN

SEQ ID NO: 135961 - protein, 9 aa, Homo sapiens
QRTSVPENH

SEQ ID NO: 135962 - protein, 9 aa, Homo sapiens
RTSVPENHA

SEQ ID NO: 135963 - protein, 9 aa, Homo sapiens
TSVPENHAQ

SEQ ID NO: 135964 - protein, 9 aa, Homo sapiens
SVPENHAQS

SEQ ID NO: 135965 - protein, 9 aa, Homo sapiens
VPENHAQSR

SEQ ID NO: 135966 - protein, 9 aa, Homo sapiens
PENHAQSRI

SEQ ID NO: 135967 - protein, 9 aa, Homo sapiens
ENHAQSRIA

SEQ ID NO: 135968 - protein, 9 aa, Homo sapiens
NHAQSRIAL

SEQ ID NO: 135969 - protein, 9 aa, Homo sapiens
HAQSRIALA

SEQ ID NO: 135970 - protein, 9 aa, Homo sapiens
AQSRIALAL

SEQ ID NO: 135971 - protein, 9 aa, Homo sapiens
QSRIALALT

SEQ ID NO: 135972 - protein, 9 aa, Homo sapiens
SRIALALTA

SEQ ID NO: 135973 - protein, 9 aa, Homo sapiens
RIALALTAI

SEQ ID NO: 135974 - protein, 9 aa, Homo sapiens
IALALTAIS

SEQ ID NO: 135975 - protein, 9 aa, Homo sapiens
ALALTAISL

SEQ ID NO: 135976 - protein, 9 aa, Homo sapiens
LALTAISLG

SEQ ID NO: 135977 - protein, 9 aa, Homo sapiens
ALTAISLGT

SEQ ID NO: 135978 - protein, 9 aa, Homo sapiens
LTAISLGTA

SEQ ID NO: 135979 - protein, 9 aa, Homo sapiens
TAISLGTAR

SEQ ID NO: 135980 - protein, 9 aa, Homo sapiens
AISLGTARP

SEQ ID NO: 135981 - protein, 9 aa, Homo sapiens
ISLGTARPP

SEQ ID NO: 135982 - protein, 9 aa, Homo sapiens
SLGTARPPP

SEQ ID NO: 135983 - protein, 9 aa, Homo sapiens
LGTARPPPS

SEQ ID NO: 135984 - protein, 9 aa, Homo sapiens
GTARPPPSM

SEQ ID NO: 135985 - protein, 9 aa, Homo sapiens
TARPPPSMS

SEQ ID NO: 135986 - protein, 9 aa, Homo sapiens
ARPPPSMSA

SEQ ID NO: 135987 - protein, 9 aa, Homo sapiens
RPPPSMSAA

SEQ ID NO: 135988 - protein, 9 aa, Homo sapiens
PPPSMSAAG

SEQ ID NO: 135989 - protein, 9 aa, Homo sapiens
PPSMSAAGL

SEQ ID NO: 135990 - protein, 9 aa, Homo sapiens
PSMSAAGLA

SEQ ID NO: 135991 - protein, 9 aa, Homo sapiens
SMSAAGLAA

SEQ ID NO: 135992 - protein, 9 aa, Homo sapiens
MSAAGLAAR

SEQ ID NO: 135993 - protein, 9 aa, Homo sapiens
SAAGLAARM

SEQ ID NO: 135994 - protein, 9 aa, Homo sapiens
AAGLAARMS

SEQ ID NO: 135995 - protein, 9 aa, Homo sapiens
AGLAARMSQ

SEQ ID NO: 135996 - protein, 9 aa, Homo sapiens
GLAARMSQV

SEQ ID NO: 135997 - protein, 9 aa, Homo sapiens
LAARMSQVP

SEQ ID NO: 135998 - protein, 9 aa, Homo sapiens
AARMSQVPA

SEQ ID NO: 135999 - protein, 9 aa, Homo sapiens
ARMSQVPAP

SEQ ID NO: 136000 - protein, 9 aa, Homo sapiens
RMSQVPAPV

SEQ ID NO: 136001 - protein, 9 aa, Homo sapiens
MSQVPAPVP

SEQ ID NO: 136002 - protein, 9 aa, Homo sapiens
SQVPAPVPL

SEQ ID NO: 136003 - protein, 9 aa, Homo sapiens
QVPAPVPLM

SEQ ID NO: 136004 - protein, 9 aa, Homo sapiens
VPAPVPLMS

SEQ ID NO: 136005 - protein, 9 aa, Homo sapiens
PAPVPLMSL

SEQ ID NO: 136006 - protein, 9 aa, Homo sapiens
APVPLMSLR

SEQ ID NO: 136007 - protein, 9 aa, Homo sapiens
PVPLMSLRT

SEQ ID NO: 136008 - protein, 9 aa, Homo sapiens
VPLMSLRTA

SEQ ID NO: 136009 - protein, 9 aa, Homo sapiens
PLMSLRTAP

SEQ ID NO: 136010 - protein, 9 aa, Homo sapiens
LMSLRTAPA

SEQ ID NO: 136011 - protein, 9 aa, Homo sapiens
MSLRTAPAA

SEQ ID NO: 136012 - protein, 9 aa, Homo sapiens
SLRTAPAAN

SEQ ID NO: 136013 - protein, 9 aa, Homo sapiens
LRTAPAANL

SEQ ID NO: 136014 - protein, 9 aa, Homo sapiens
RTAPAANLA

SEQ ID NO: 136015 - protein, 9 aa, Homo sapiens
TAPAANLAS

SEQ ID NO: 136016 - protein, 9 aa, Homo sapiens
APAANLASR

SEQ ID NO: 136017 - protein, 9 aa, Homo sapiens
PAANLASRI

SEQ ID NO: 136018 - protein, 9 aa, Homo sapiens
AANLASRIP

SEQ ID NO: 136019 - protein, 9 aa, Homo sapiens
ANLASRIPA

SEQ ID NO: 136020 - protein, 9 aa, Homo sapiens
NLASRIPAA

SEQ ID NO: 136021 - protein, 9 aa, Homo sapiens
LASRIPAAS

SEQ ID NO: 136022 - protein, 9 aa, Homo sapiens
ASRIPAASA

SEQ ID NO: 136023 - protein, 9 aa, Homo sapiens
SRIPAASAA

SEQ ID NO: 136024 - protein, 9 aa, Homo sapiens
RIPAASAAA

SEQ ID NO: 136025 - protein, 9 aa, Homo sapiens
IPAASAAAM

SEQ ID NO: 136026 - protein, 9 aa, Homo sapiens
PAASAAAMN

SEQ ID NO: 136027 - protein, 9 aa, Homo sapiens
AASAAAMNL

SEQ ID NO: 136028 - protein, 9 aa, Homo sapiens
ASAAAMNLA

SEQ ID NO: 136029 - protein, 9 aa, Homo sapiens
SAAAMNLAS

SEQ ID NO: 136030 - protein, 9 aa, Homo sapiens
AAAMNLASA

SEQ ID NO: 136031 - protein, 9 aa, Homo sapiens
AAMNLASAR

SEQ ID NO: 136032 - protein, 9 aa, Homo sapiens
AMNLASART

SEQ ID NO: 136033 - protein, 9 aa, Homo sapiens
MNLASARTP

SEQ ID NO: 136034 - protein, 9 aa, Homo sapiens
NLASARTPA

SEQ ID NO: 136035 - protein, 9 aa, Homo sapiens
LASARTPAI

SEQ ID NO: 136036 - protein, 9 aa, Homo sapiens
ASARTPAIP

SEQ ID NO: 136037 - protein, 9 aa, Homo sapiens
SARTPAIPT

SEQ ID NO: 136038 - protein, 9 aa, Homo sapiens
ARTPAIPTA

SEQ ID NO: 136039 - protein, 9 aa, Homo sapiens
RTPAIPTAV

SEQ ID NO: 136040 - protein, 9 aa, Homo sapiens
TPAIPTAVN

SEQ ID NO: 136041 - protein, 9 aa, Homo sapiens
PAIPTAVNL

SEQ ID NO: 136042 - protein, 9 aa, Homo sapiens
AIPTAVNLA

SEQ ID NO: 136043 - protein, 9 aa, Homo sapiens
IPTAVNLAD

SEQ ID NO: 136044 - protein, 9 aa, Homo sapiens
PTAVNLADS

SEQ ID NO: 136045 - protein, 9 aa, Homo sapiens
TAVNLADSR

SEQ ID NO: 136046 - protein, 9 aa, Homo sapiens
AVNLADSRT

SEQ ID NO: 136047 - protein, 9 aa, Homo sapiens
VNLADSRTP

SEQ ID NO: 136048 - protein, 9 aa, Homo sapiens
NLADSRTPA

SEQ ID NO: 136049 - protein, 9 aa, Homo sapiens
LADSRTPAA

SEQ ID NO: 136050 - protein, 9 aa, Homo sapiens
ADSRTPAAA

SEQ ID NO: 136051 - protein, 9 aa, Homo sapiens
DSRTPAAAA

SEQ ID NO: 136052 - protein, 9 aa, Homo sapiens
SRTPAAAAA

SEQ ID NO: 136053 - protein, 9 aa, Homo sapiens
RTPAAAAAM

SEQ ID NO: 136054 - protein, 9 aa, Homo sapiens
TPAAAAAMN

SEQ ID NO: 136055 - protein, 9 aa, Homo sapiens
PAAAAAMNL

SEQ ID NO: 136056 - protein, 9 aa, Homo sapiens
AAAAAMNLA

SEQ ID NO: 136057 - protein, 9 aa, Homo sapiens
AAAAMNLAS

SEQ ID NO: 136058 - protein, 9 aa, Homo sapiens
AAAMNLASP

SEQ ID NO: 136059 - protein, 9 aa, Homo sapiens
AAMNLASPR

SEQ ID NO: 136060 - protein, 9 aa, Homo sapiens
AMNLASPRT

SEQ ID NO: 136061 - protein, 9 aa, Homo sapiens
MNLASPRTA

SEQ ID NO: 136062 - protein, 9 aa, Homo sapiens
NLASPRTAV

SEQ ID NO: 136063 - protein, 9 aa, Homo sapiens
LASPRTAVA

SEQ ID NO: 136064 - protein, 9 aa, Homo sapiens
ASPRTAVAP

SEQ ID NO: 136065 - protein, 9 aa, Homo sapiens
SPRTAVAPS

SEQ ID NO: 136066 - protein, 9 aa, Homo sapiens
PRTAVAPSA

SEQ ID NO: 136067 - protein, 9 aa, Homo sapiens
RTAVAPSAV

SEQ ID NO: 136068 - protein, 9 aa, Homo sapiens
TAVAPSAVN

SEQ ID NO: 136069 - protein, 9 aa, Homo sapiens
AVAPSAVNL

SEQ ID NO: 136070 - protein, 9 aa, Homo sapiens
VAPSAVNLA

SEQ ID NO: 136071 - protein, 9 aa, Homo sapiens
APSAVNLAD

SEQ ID NO: 136072 - protein, 9 aa, Homo sapiens
PSAVNLADP

SEQ ID NO: 136073 - protein, 9 aa, Homo sapiens
SAVNLADPR

SEQ ID NO: 136074 - protein, 9 aa, Homo sapiens
AVNLADPRT

SEQ ID NO: 136075 - protein, 9 aa, Homo sapiens
VNLADPRTP

SEQ ID NO: 136076 - protein, 9 aa, Homo sapiens
NLADPRTPT

SEQ ID NO: 136077 - protein, 9 aa, Homo sapiens
LADPRTPTA

SEQ ID NO: 136078 - protein, 9 aa, Homo sapiens
ADPRTPTAP

SEQ ID NO: 136079 - protein, 9 aa, Homo sapiens
DPRTPTAPA

SEQ ID NO: 136080 - protein, 9 aa, Homo sapiens
PRTPTAPAV

SEQ ID NO: 136081 - protein, 9 aa, Homo sapiens
RTPTAPAVN

SEQ ID NO: 136082 - protein, 9 aa, Homo sapiens
TPTAPAVNL

SEQ ID NO: 136083 - protein, 9 aa, Homo sapiens
PTAPAVNLA

SEQ ID NO: 136084 - protein, 9 aa, Homo sapiens
TAPAVNLAG

SEQ ID NO: 136085 - protein, 9 aa, Homo sapiens
APAVNLAGA

SEQ ID NO: 136086 - protein, 9 aa, Homo sapiens
PAVNLAGAR

SEQ ID NO: 136087 - protein, 9 aa, Homo sapiens
AVNLAGART

SEQ ID NO: 136088 - protein, 9 aa, Homo sapiens
VNLAGARTP

SEQ ID NO: 136089 - protein, 9 aa, Homo sapiens
NLAGARTPA

SEQ ID NO: 136090 - protein, 9 aa, Homo sapiens
LAGARTPAA

SEQ ID NO: 136091 - protein, 9 aa, Homo sapiens
AGARTPAAL

SEQ ID NO: 136092 - protein, 9 aa, Homo sapiens
GARTPAALA

SEQ ID NO: 136093 - protein, 9 aa, Homo sapiens
ARTPAALAA

SEQ ID NO: 136094 - protein, 9 aa, Homo sapiens
RTPAALAAL

SEQ ID NO: 136095 - protein, 9 aa, Homo sapiens
TPAALAALS

SEQ ID NO: 136096 - protein, 9 aa, Homo sapiens
PAALAALSL

SEQ ID NO: 136097 - protein, 9 aa, Homo sapiens
AALAALSLT

SEQ ID NO: 136098 - protein, 9 aa, Homo sapiens
ALAALSLTG

SEQ ID NO: 136099 - protein, 9 aa, Homo sapiens
LAALSLTGS

SEQ ID NO: 136100 - protein, 9 aa, Homo sapiens
AALSLTGSG

SEQ ID NO: 136101 - protein, 9 aa, Homo sapiens
ALSLTGSGT

SEQ ID NO: 136102 - protein, 9 aa, Homo sapiens
LSLTGSGTP

SEQ ID NO: 136103 - protein, 9 aa, Homo sapiens
SLTGSGTPP

SEQ ID NO: 136104 - protein, 9 aa, Homo sapiens
LTGSGTPPT

SEQ ID NO: 136105 - protein, 9 aa, Homo sapiens
TGSGTPPTA

SEQ ID NO: 136106 - protein, 9 aa, Homo sapiens
GSGTPPTAA

SEQ ID NO: 136107 - protein, 9 aa, Homo sapiens
SGTPPTAAN

SEQ ID NO: 136108 - protein, 9 aa, Homo sapiens
GTPPTAANY

SEQ ID NO: 136109 - protein, 9 aa, Homo sapiens
TPPTAANYP

SEQ ID NO: 136110 - protein, 9 aa, Homo sapiens
PPTAANYPS

SEQ ID NO: 136111 - protein, 9 aa, Homo sapiens
PTAANYPSS

SEQ ID NO: 136112 - protein, 9 aa, Homo sapiens
TAANYPSSS

SEQ ID NO: 136113 - protein, 9 aa, Homo sapiens
AANYPSSSR

SEQ ID NO: 136114 - protein, 9 aa, Homo sapiens
ANYPSSSRT

SEQ ID NO: 136115 - protein, 9 aa, Homo sapiens
NYPSSSRTP

SEQ ID NO: 136116 - protein, 9 aa, Homo sapiens
YPSSSRTPQ

SEQ ID NO: 136117 - protein, 9 aa, Homo sapiens
PSSSRTPQA

SEQ ID NO: 136118 - protein, 9 aa, Homo sapiens
SSSRTPQAP

SEQ ID NO: 136119 - protein, 9 aa, Homo sapiens
SSRTPQAPA

SEQ ID NO: 136120 - protein, 9 aa, Homo sapiens
SRTPQAPAS

SEQ ID NO: 136121 - protein, 9 aa, Homo sapiens
RTPQAPASA

SEQ ID NO: 136122 - protein, 9 aa, Homo sapiens
TPQAPASAN

SEQ ID NO: 136123 - protein, 9 aa, Homo sapiens
PQAPASANL

SEQ ID NO: 136124 - protein, 9 aa, Homo sapiens
QAPASANLV

SEQ ID NO: 136125 - protein, 9 aa, Homo sapiens
APASANLVG

SEQ ID NO: 136126 - protein, 9 aa, Homo sapiens
PASANLVGP

SEQ ID NO: 136127 - protein, 9 aa, Homo sapiens
ASANLVGPR

SEQ ID NO: 136128 - protein, 9 aa, Homo sapiens
SANLVGPRS

SEQ ID NO: 136129 - protein, 9 aa, Homo sapiens
ANLVGPRSA

SEQ ID NO: 136130 - protein, 9 aa, Homo sapiens
NLVGPRSAH

SEQ ID NO: 136131 - protein, 9 aa, Homo sapiens
LVGPRSAHA

SEQ ID NO: 136132 - protein, 9 aa, Homo sapiens
VGPRSAHAT

SEQ ID NO: 136133 - protein, 9 aa, Homo sapiens
GPRSAHATA

SEQ ID NO: 136134 - protein, 9 aa, Homo sapiens
PRSAHATAP

SEQ ID NO: 136135 - protein, 9 aa, Homo sapiens
RSAHATAPV

SEQ ID NO: 136136 - protein, 9 aa, Homo sapiens
SAHATAPVN

SEQ ID NO: 136137 - protein, 9 aa, Homo sapiens
AHATAPVNI

SEQ ID NO: 136138 - protein, 9 aa, Homo sapiens
HATAPVNIA

SEQ ID NO: 136139 - protein, 9 aa, Homo sapiens
ATAPVNIAG

SEQ ID NO: 136140 - protein, 9 aa, Homo sapiens
TAPVNIAGS

SEQ ID NO: 136141 - protein, 9 aa, Homo sapiens
APVNIAGSR

SEQ ID NO: 136142 - protein, 9 aa, Homo sapiens
PVNIAGSRT

SEQ ID NO: 136143 - protein, 9 aa, Homo sapiens
VNIAGSRTA

SEQ ID NO: 136144 - protein, 9 aa, Homo sapiens
NIAGSRTAA

SEQ ID NO: 136145 - protein, 9 aa, Homo sapiens
IAGSRTAAA

SEQ ID NO: 136146 - protein, 9 aa, Homo sapiens
AGSRTAAAL

SEQ ID NO: 136147 - protein, 9 aa, Homo sapiens
GSRTAAALA

SEQ ID NO: 136148 - protein, 9 aa, Homo sapiens
SRTAAALAP

SEQ ID NO: 136149 - protein, 9 aa, Homo sapiens
RTAAALAPA

SEQ ID NO: 136150 - protein, 9 aa, Homo sapiens
TAAALAPAS

SEQ ID NO: 136151 - protein, 9 aa, Homo sapiens
AAALAPASL

SEQ ID NO: 136152 - protein, 9 aa, Homo sapiens
AALAPASLT

SEQ ID NO: 136153 - protein, 9 aa, Homo sapiens
ALAPASLTS

SEQ ID NO: 136154 - protein, 9 aa, Homo sapiens
LAPASLTSA

SEQ ID NO: 136155 - protein, 9 aa, Homo sapiens
APASLTSAR

SEQ ID NO: 136156 - protein, 9 aa, Homo sapiens
PASLTSARM

SEQ ID NO: 136157 - protein, 9 aa, Homo sapiens
ASLTSARMA

SEQ ID NO: 136158 - protein, 9 aa, Homo sapiens
SLTSARMAP

SEQ ID NO: 136159 - protein, 9 aa, Homo sapiens
LTSARMAPA

SEQ ID NO: 136160 - protein, 9 aa, Homo sapiens
TSARMAPAL

SEQ ID NO: 136161 - protein, 9 aa, Homo sapiens
SARMAPALS

SEQ ID NO: 136162 - protein, 9 aa, Homo sapiens
ARMAPALSG

SEQ ID NO: 136163 - protein, 9 aa, Homo sapiens
RMAPALSGA

SEQ ID NO: 136164 - protein, 9 aa, Homo sapiens
MAPALSGAN

SEQ ID NO: 136165 - protein, 9 aa, Homo sapiens
APALSGANL

SEQ ID NO: 136166 - protein, 9 aa, Homo sapiens
PALSGANLT

SEQ ID NO: 136167 - protein, 9 aa, Homo sapiens
ALSGANLTS

SEQ ID NO: 136168 - protein, 9 aa, Homo sapiens
LSGANLTSP

SEQ ID NO: 136169 - protein, 9 aa, Homo sapiens
SGANLTSPR

SEQ ID NO: 136170 - protein, 9 aa, Homo sapiens
GANLTSPRV

SEQ ID NO: 136171 - protein, 9 aa, Homo sapiens
ANLTSPRVP

SEQ ID NO: 136172 - protein, 9 aa, Homo sapiens
NLTSPRVPL

SEQ ID NO: 136173 - protein, 9 aa, Homo sapiens
LTSPRVPLS

SEQ ID NO: 136174 - protein, 9 aa, Homo sapiens
TSPRVPLSA

SEQ ID NO: 136175 - protein, 9 aa, Homo sapiens
SPRVPLSAY

SEQ ID NO: 136176 - protein, 9 aa, Homo sapiens
PRVPLSAYE

SEQ ID NO: 136177 - protein, 9 aa, Homo sapiens
RVPLSAYER

SEQ ID NO: 136178 - protein, 9 aa, Homo sapiens
VPLSAYERV

SEQ ID NO: 136179 - protein, 9 aa, Homo sapiens
PLSAYERVS

SEQ ID NO: 136180 - protein, 9 aa, Homo sapiens
LSAYERVSG

SEQ ID NO: 136181 - protein, 9 aa, Homo sapiens
SAYERVSGR

SEQ ID NO: 136182 - protein, 9 aa, Homo sapiens
AYERVSGRT

SEQ ID NO: 136183 - protein, 9 aa, Homo sapiens
YERVSGRTS

SEQ ID NO: 136184 - protein, 9 aa, Homo sapiens
ERVSGRTSP

SEQ ID NO: 136185 - protein, 9 aa, Homo sapiens
RVSGRTSPP

SEQ ID NO: 136186 - protein, 9 aa, Homo sapiens
VSGRTSPPL

SEQ ID NO: 136187 - protein, 9 aa, Homo sapiens
SGRTSPPLL

SEQ ID NO: 136188 - protein, 9 aa, Homo sapiens
GRTSPPLLD

SEQ ID NO: 136189 - protein, 9 aa, Homo sapiens
RTSPPLLDR

SEQ ID NO: 136190 - protein, 9 aa, Homo sapiens
TSPPLLDRA

SEQ ID NO: 136191 - protein, 9 aa, Homo sapiens
SPPLLDRAR

SEQ ID NO: 136192 - protein, 9 aa, Homo sapiens
PPLLDRARS

SEQ ID NO: 136193 - protein, 9 aa, Homo sapiens
PLLDRARSR

SEQ ID NO: 136194 - protein, 9 aa, Homo sapiens
LLDRARSRT

SEQ ID NO: 136195 - protein, 9 aa, Homo sapiens
LDRARSRTP

SEQ ID NO: 136196 - protein, 9 aa, Homo sapiens
DRARSRTPP

SEQ ID NO: 136197 - protein, 9 aa, Homo sapiens
RARSRTPPS

SEQ ID NO: 136198 - protein, 9 aa, Homo sapiens
ARSRTPPSA

SEQ ID NO: 136199 - protein, 9 aa, Homo sapiens
RSRTPPSAP

SEQ ID NO: 136200 - protein, 9 aa, Homo sapiens
SRTPPSAPS

SEQ ID NO: 136201 - protein, 9 aa, Homo sapiens
RTPPSAPSQ

SEQ ID NO: 136202 - protein, 9 aa, Homo sapiens
TPPSAPSQS

SEQ ID NO: 136203 - protein, 9 aa, Homo sapiens
PPSAPSQSR

SEQ ID NO: 136204 - protein, 9 aa, Homo sapiens
PSAPSQSRM

SEQ ID NO: 136205 - protein, 9 aa, Homo sapiens
SAPSQSRMT

SEQ ID NO: 136206 - protein, 9 aa, Homo sapiens
APSQSRMTS

SEQ ID NO: 136207 - protein, 9 aa, Homo sapiens
PSQSRMTSE

SEQ ID NO: 136208 - protein, 9 aa, Homo sapiens
SQSRMTSER

SEQ ID NO: 136209 - protein, 9 aa, Homo sapiens
QSRMTSERA

SEQ ID NO: 136210 - protein, 9 aa, Homo sapiens
SRMTSERAP

SEQ ID NO: 136211 - protein, 9 aa, Homo sapiens
RMTSERAPS

SEQ ID NO: 136212 - protein, 9 aa, Homo sapiens
MTSERAPSP

SEQ ID NO: 136213 - protein, 9 aa, Homo sapiens
TSERAPSPS

SEQ ID NO: 136214 - protein, 9 aa, Homo sapiens
SERAPSPSS

SEQ ID NO: 136215 - protein, 9 aa, Homo sapiens
ERAPSPSSR

SEQ ID NO: 136216 - protein, 9 aa, Homo sapiens
RAPSPSSRM

SEQ ID NO: 136217 - protein, 9 aa, Homo sapiens
APSPSSRMG

SEQ ID NO: 136218 - protein, 9 aa, Homo sapiens
PSPSSRMGQ

SEQ ID NO: 136219 - protein, 9 aa, Homo sapiens
SPSSRMGQA

SEQ ID NO: 136220 - protein, 9 aa, Homo sapiens
PSSRMGQAP

SEQ ID NO: 136221 - protein, 9 aa, Homo sapiens
SSRMGQAPS

SEQ ID NO: 136222 - protein, 9 aa, Homo sapiens
SRMGQAPSQ

SEQ ID NO: 136223 - protein, 9 aa, Homo sapiens
RMGQAPSQS

SEQ ID NO: 136224 - protein, 9 aa, Homo sapiens
MGQAPSQSL

SEQ ID NO: 136225 - protein, 9 aa, Homo sapiens
GQAPSQSLL

SEQ ID NO: 136226 - protein, 9 aa, Homo sapiens
QAPSQSLLP

SEQ ID NO: 136227 - protein, 9 aa, Homo sapiens
APSQSLLPP

SEQ ID NO: 136228 - protein, 9 aa, Homo sapiens
PSQSLLPPA

SEQ ID NO: 136229 - protein, 9 aa, Homo sapiens
SQSLLPPAQ

SEQ ID NO: 136230 - protein, 9 aa, Homo sapiens
QSLLPPAQD

SEQ ID NO: 136231 - protein, 9 aa, Homo sapiens
SLLPPAQDQ

SEQ ID NO: 136232 - protein, 9 aa, Homo sapiens
LLPPAQDQP

SEQ ID NO: 136233 - protein, 9 aa, Homo sapiens
LPPAQDQPR

SEQ ID NO: 136234 - protein, 9 aa, Homo sapiens
PPAQDQPRS

SEQ ID NO: 136235 - protein, 9 aa, Homo sapiens
PAQDQPRSP

SEQ ID NO: 136236 - protein, 9 aa, Homo sapiens
AQDQPRSPV

SEQ ID NO: 136237 - protein, 9 aa, Homo sapiens
QDQPRSPVP

SEQ ID NO: 136238 - protein, 9 aa, Homo sapiens
DQPRSPVPS

SEQ ID NO: 136239 - protein, 9 aa, Homo sapiens
QPRSPVPSA

SEQ ID NO: 136240 - protein, 9 aa, Homo sapiens
PRSPVPSAF

SEQ ID NO: 136241 - protein, 9 aa, Homo sapiens
RSPVPSAFS

SEQ ID NO: 136242 - protein, 9 aa, Homo sapiens
SPVPSAFSD

SEQ ID NO: 136243 - protein, 9 aa, Homo sapiens
PVPSAFSDQ

SEQ ID NO: 136244 - protein, 9 aa, Homo sapiens
VPSAFSDQS

SEQ ID NO: 136245 - protein, 9 aa, Homo sapiens
PSAFSDQSR

SEQ ID NO: 136246 - protein, 9 aa, Homo sapiens
SAFSDQSRC

SEQ ID NO: 136247 - protein, 9 aa, Homo sapiens
AFSDQSRCL

SEQ ID NO: 136248 - protein, 9 aa, Homo sapiens
FSDQSRCLI

SEQ ID NO: 136249 - protein, 9 aa, Homo sapiens
SDQSRCLIA

SEQ ID NO: 136250 - protein, 9 aa, Homo sapiens
DQSRCLIAQ

SEQ ID NO: 136251 - protein, 9 aa, Homo sapiens
QSRCLIAQT

SEQ ID NO: 136252 - protein, 9 aa, Homo sapiens
SRCLIAQTT

SEQ ID NO: 136253 - protein, 9 aa, Homo sapiens
RCLIAQTTP

SEQ ID NO: 136254 - protein, 9 aa, Homo sapiens
CLIAQTTPV

SEQ ID NO: 136255 - protein, 9 aa, Homo sapiens
LIAQTTPVA

SEQ ID NO: 136256 - protein, 9 aa, Homo sapiens
IAQTTPVAG

SEQ ID NO: 136257 - protein, 9 aa, Homo sapiens
AQTTPVAGS

SEQ ID NO: 136258 - protein, 9 aa, Homo sapiens
QTTPVAGSQ

SEQ ID NO: 136259 - protein, 9 aa, Homo sapiens
TTPVAGSQS

SEQ ID NO: 136260 - protein, 9 aa, Homo sapiens
TPVAGSQSL

SEQ ID NO: 136261 - protein, 9 aa, Homo sapiens
PVAGSQSLS

SEQ ID NO: 136262 - protein, 9 aa, Homo sapiens
VAGSQSLSS

SEQ ID NO: 136263 - protein, 9 aa, Homo sapiens
AGSQSLSSG

SEQ ID NO: 136264 - protein, 9 aa, Homo sapiens
GSQSLSSGA

SEQ ID NO: 136265 - protein, 9 aa, Homo sapiens
SQSLSSGAV

SEQ ID NO: 136266 - protein, 9 aa, Homo sapiens
QSLSSGAVA

SEQ ID NO: 136267 - protein, 9 aa, Homo sapiens
SLSSGAVAT

SEQ ID NO: 136268 - protein, 9 aa, Homo sapiens
LSSGAVATT

SEQ ID NO: 136269 - protein, 9 aa, Homo sapiens
SSGAVATTT

SEQ ID NO: 136270 - protein, 9 aa, Homo sapiens
SGAVATTTS

SEQ ID NO: 136271 - protein, 9 aa, Homo sapiens
GAVATTTSS

SEQ ID NO: 136272 - protein, 9 aa, Homo sapiens
AVATTTSSA

SEQ ID NO: 136273 - protein, 9 aa, Homo sapiens
VATTTSSAG

SEQ ID NO: 136274 - protein, 9 aa, Homo sapiens
ATTTSSAGD

SEQ ID NO: 136275 - protein, 9 aa, Homo sapiens
TTTSSAGDH

SEQ ID NO: 136276 - protein, 9 aa, Homo sapiens
TTSSAGDHN

SEQ ID NO: 136277 - protein, 9 aa, Homo sapiens
TSSAGDHNG

SEQ ID NO: 136278 - protein, 9 aa, Homo sapiens
SSAGDHNGM

SEQ ID NO: 136279 - protein, 9 aa, Homo sapiens
SAGDHNGML

SEQ ID NO: 136280 - protein, 9 aa, Homo sapiens
AGDHNGMLS

SEQ ID NO: 136281 - protein, 9 aa, Homo sapiens
GDHNGMLSV

SEQ ID NO: 136282 - protein, 9 aa, Homo sapiens
DHNGMLSVP

SEQ ID NO: 136283 - protein, 9 aa, Homo sapiens
HNGMLSVPA

SEQ ID NO: 136284 - protein, 9 aa, Homo sapiens
NGMLSVPAP

SEQ ID NO: 136285 - protein, 9 aa, Homo sapiens
GMLSVPAPG

SEQ ID NO: 136286 - protein, 9 aa, Homo sapiens
MLSVPAPGV

SEQ ID NO: 136287 - protein, 9 aa, Homo sapiens
LSVPAPGVP

SEQ ID NO: 136288 - protein, 9 aa, Homo sapiens
SVPAPGVPH

SEQ ID NO: 136289 - protein, 9 aa, Homo sapiens
VPAPGVPHS

SEQ ID NO: 136290 - protein, 9 aa, Homo sapiens
PAPGVPHSD

SEQ ID NO: 136291 - protein, 9 aa, Homo sapiens
APGVPHSDV

SEQ ID NO: 136292 - protein, 9 aa, Homo sapiens
PGVPHSDVG

SEQ ID NO: 136293 - protein, 9 aa, Homo sapiens
GVPHSDVGE

SEQ ID NO: 136294 - protein, 9 aa, Homo sapiens
VPHSDVGEP

SEQ ID NO: 136295 - protein, 9 aa, Homo sapiens
PHSDVGEPP

SEQ ID NO: 136296 - protein, 9 aa, Homo sapiens
HSDVGEPPA

SEQ ID NO: 136297 - protein, 9 aa, Homo sapiens
SDVGEPPAS

SEQ ID NO: 136298 - protein, 9 aa, Homo sapiens
DVGEPPAST

SEQ ID NO: 136299 - protein, 9 aa, Homo sapiens
VGEPPASTG

SEQ ID NO: 136300 - protein, 9 aa, Homo sapiens
GEPPASTGA

SEQ ID NO: 136301 - protein, 9 aa, Homo sapiens
EPPASTGAQ

SEQ ID NO: 136302 - protein, 9 aa, Homo sapiens
PPASTGAQQ

SEQ ID NO: 136303 - protein, 9 aa, Homo sapiens
PASTGAQQP

SEQ ID NO: 136304 - protein, 9 aa, Homo sapiens
ASTGAQQPS

SEQ ID NO: 136305 - protein, 9 aa, Homo sapiens
STGAQQPSA

SEQ ID NO: 136306 - protein, 9 aa, Homo sapiens
TGAQQPSAL

SEQ ID NO: 136307 - protein, 9 aa, Homo sapiens
GAQQPSALA

SEQ ID NO: 136308 - protein, 9 aa, Homo sapiens
AQQPSALAA

SEQ ID NO: 136309 - protein, 9 aa, Homo sapiens
QQPSALAAL

SEQ ID NO: 136310 - protein, 9 aa, Homo sapiens
QPSALAALQ

SEQ ID NO: 136311 - protein, 9 aa, Homo sapiens
PSALAALQP

SEQ ID NO: 136312 - protein, 9 aa, Homo sapiens
SALAALQPA

SEQ ID NO: 136313 - protein, 9 aa, Homo sapiens
ALAALQPAK

SEQ ID NO: 136314 - protein, 9 aa, Homo sapiens
LAALQPAKE

SEQ ID NO: 136315 - protein, 9 aa, Homo sapiens
AALQPAKER

SEQ ID NO: 136316 - protein, 9 aa, Homo sapiens
ALQPAKERR

SEQ ID NO: 136317 - protein, 9 aa, Homo sapiens
LQPAKERRS

SEQ ID NO: 136318 - protein, 9 aa, Homo sapiens
QPAKERRSS

SEQ ID NO: 136319 - protein, 9 aa, Homo sapiens
PAKERRSSS

SEQ ID NO: 136320 - protein, 9 aa, Homo sapiens
AKERRSSSS

SEQ ID NO: 136321 - protein, 9 aa, Homo sapiens
KERRSSSSS

SEQ ID NO: 136322 - protein, 9 aa, Homo sapiens
ERRSSSSSS

SEQ ID NO: 136323 - protein, 9 aa, Homo sapiens
RRSSSSSSS

SEQ ID NO: 136324 - protein, 9 aa, Homo sapiens
RSSSSSSSS

SEQ ID NO: 136325 - protein, 9 aa, Homo sapiens
SSSSSSSSS

SEQ ID NO: 136326 - protein, 9 aa, Homo sapiens
SSSSSSSSS

SEQ ID NO: 136327 - protein, 9 aa, Homo sapiens
SSSSSSSSS

SEQ ID NO: 136328 - protein, 9 aa, Homo sapiens
SSSSSSSSS

SEQ ID NO: 136329 - protein, 9 aa, Homo sapiens
SSSSSSSSS

SEQ ID NO: 136330 - protein, 9 aa, Homo sapiens
SSSSSSSSS

SEQ ID NO: 136331 - protein, 9 aa, Homo sapiens
SSSSSSSSS

SEQ ID NO: 136332 - protein, 9 aa, Homo sapiens
SSSSSSSSS

SEQ ID NO: 136333 - protein, 9 aa, Homo sapiens
SSSSSSSSS

SEQ ID NO: 136334 - protein, 9 aa, Homo sapiens
SSSSSSSSS

SEQ ID NO: 136335 - protein, 9 aa, Homo sapiens
SSSSSSSSS

SEQ ID NO: 136336 - protein, 9 aa, Homo sapiens
SSSSSSSSS

SEQ ID NO: 136337 - protein, 9 aa, Homo sapiens
SSSSSSSSS

SEQ ID NO: 136338 - protein, 9 aa, Homo sapiens
SSSSSSSSS

SEQ ID NO: 136339 - protein, 9 aa, Homo sapiens
SSSSSSSSS

SEQ ID NO: 136340 - protein, 9 aa, Homo sapiens
SSSSSSSSS

SEQ ID NO: 136341 - protein, 9 aa, Homo sapiens
SSSSSSSSS

SEQ ID NO: 136342 - protein, 9 aa, Homo sapiens
SSSSSSSSG

SEQ ID NO: 136343 - protein, 9 aa, Homo sapiens
SSSSSSSGS

SEQ ID NO: 136344 - protein, 9 aa, Homo sapiens
SSSSSSGSS

SEQ ID NO: 136345 - protein, 9 aa, Homo sapiens
SSSSSGSSS

SEQ ID NO: 136346 - protein, 9 aa, Homo sapiens
SSSSGSSSS

SEQ ID NO: 136347 - protein, 9 aa, Homo sapiens
SSSGSSSSD

SEQ ID NO: 136348 - protein, 9 aa, Homo sapiens
SSGSSSSDS

SEQ ID NO: 136349 - protein, 9 aa, Homo sapiens
SGSSSSDSE

SEQ ID NO: 136350 - protein, 9 aa, Homo sapiens
GSSSSDSEG

SEQ ID NO: 136351 - protein, 9 aa, Homo sapiens
SSSSDSEGS

SEQ ID NO: 136352 - protein, 9 aa, Homo sapiens
SSSDSEGSS

SEQ ID NO: 136353 - protein, 9 aa, Homo sapiens
SSDSEGSSL

SEQ ID NO: 136354 - protein, 9 aa, Homo sapiens
SDSEGSSLP

SEQ ID NO: 136355 - protein, 9 aa, Homo sapiens
DSEGSSLPV

SEQ ID NO: 136356 - protein, 9 aa, Homo sapiens
SEGSSLPVQ

SEQ ID NO: 136357 - protein, 9 aa, Homo sapiens
EGSSLPVQP

SEQ ID NO: 136358 - protein, 9 aa, Homo sapiens
GSSLPVQPE

SEQ ID NO: 136359 - protein, 9 aa, Homo sapiens
SSLPVQPEV

SEQ ID NO: 136360 - protein, 9 aa, Homo sapiens
SLPVQPEVA

SEQ ID NO: 136361 - protein, 9 aa, Homo sapiens
LPVQPEVAL

SEQ ID NO: 136362 - protein, 9 aa, Homo sapiens
PVQPEVALK

SEQ ID NO: 136363 - protein, 9 aa, Homo sapiens
VQPEVALKR

SEQ ID NO: 136364 - protein, 9 aa, Homo sapiens
QPEVALKRV

SEQ ID NO: 136365 - protein, 9 aa, Homo sapiens
PEVALKRVP

SEQ ID NO: 136366 - protein, 9 aa, Homo sapiens
EVALKRVPS

SEQ ID NO: 136367 - protein, 9 aa, Homo sapiens
VALKRVPSP

SEQ ID NO: 136368 - protein, 9 aa, Homo sapiens
ALKRVPSPT

SEQ ID NO: 136369 - protein, 9 aa, Homo sapiens
LKRVPSPTP

SEQ ID NO: 136370 - protein, 9 aa, Homo sapiens
KRVPSPTPA

SEQ ID NO: 136371 - protein, 9 aa, Homo sapiens
RVPSPTPAP

SEQ ID NO: 136372 - protein, 9 aa, Homo sapiens
VPSPTPAPK

SEQ ID NO: 136373 - protein, 9 aa, Homo sapiens
PSPTPAPKE

SEQ ID NO: 136374 - protein, 9 aa, Homo sapiens
SPTPAPKEA

SEQ ID NO: 136375 - protein, 9 aa, Homo sapiens
PTPAPKEAV

SEQ ID NO: 136376 - protein, 9 aa, Homo sapiens
TPAPKEAVR

SEQ ID NO: 136377 - protein, 9 aa, Homo sapiens
PAPKEAVRE

SEQ ID NO: 136378 - protein, 9 aa, Homo sapiens
APKEAVREG

SEQ ID NO: 136379 - protein, 9 aa, Homo sapiens
PKEAVREGR

SEQ ID NO: 136380 - protein, 9 aa, Homo sapiens
KEAVREGRP

SEQ ID NO: 136381 - protein, 9 aa, Homo sapiens
EAVREGRPP

SEQ ID NO: 136382 - protein, 9 aa, Homo sapiens
AVREGRPPE

SEQ ID NO: 136383 - protein, 9 aa, Homo sapiens
VREGRPPEP

SEQ ID NO: 136384 - protein, 9 aa, Homo sapiens
REGRPPEPT

SEQ ID NO: 136385 - protein, 9 aa, Homo sapiens
EGRPPEPTP

SEQ ID NO: 136386 - protein, 9 aa, Homo sapiens
GRPPEPTPA

SEQ ID NO: 136387 - protein, 9 aa, Homo sapiens
RPPEPTPAK

SEQ ID NO: 136388 - protein, 9 aa, Homo sapiens
PPEPTPAKR

SEQ ID NO: 136389 - protein, 9 aa, Homo sapiens
PEPTPAKRK

SEQ ID NO: 136390 - protein, 9 aa, Homo sapiens
EPTPAKRKR

SEQ ID NO: 136391 - protein, 9 aa, Homo sapiens
PTPAKRKRR

SEQ ID NO: 136392 - protein, 9 aa, Homo sapiens
TPAKRKRRS

SEQ ID NO: 136393 - protein, 9 aa, Homo sapiens
PAKRKRRSS

SEQ ID NO: 136394 - protein, 9 aa, Homo sapiens
AKRKRRSSS

SEQ ID NO: 136395 - protein, 9 aa, Homo sapiens
KRKRRSSSS

SEQ ID NO: 136396 - protein, 9 aa, Homo sapiens
RKRRSSSSS

SEQ ID NO: 136397 - protein, 9 aa, Homo sapiens
KRRSSSSSS

SEQ ID NO: 136398 - protein, 9 aa, Homo sapiens
RRSSSSSSS

SEQ ID NO: 136399 - protein, 9 aa, Homo sapiens
RSSSSSSSS

SEQ ID NO: 136400 - protein, 9 aa, Homo sapiens
SSSSSSSSS

SEQ ID NO: 136401 - protein, 9 aa, Homo sapiens
SSSSSSSSS

SEQ ID NO: 136402 - protein, 9 aa, Homo sapiens
SSSSSSSSS

SEQ ID NO: 136403 - protein, 9 aa, Homo sapiens
SSSSSSSSS

SEQ ID NO: 136404 - protein, 9 aa, Homo sapiens
SSSSSSSSS

SEQ ID NO: 136405 - protein, 9 aa, Homo sapiens
SSSSSSSSS

SEQ ID NO: 136406 - protein, 9 aa, Homo sapiens
SSSSSSSSS

SEQ ID NO: 136407 - protein, 9 aa, Homo sapiens
SSSSSSSSS

SEQ ID NO: 136408 - protein, 9 aa, Homo sapiens
SSSSSSSSS

SEQ ID NO: 136409 - protein, 9 aa, Homo sapiens
SSSSSSSSS

SEQ ID NO: 136410 - protein, 9 aa, Homo sapiens
SSSSSSSSS

SEQ ID NO: 136411 - protein, 9 aa, Homo sapiens
SSSSSSSSS

SEQ ID NO: 136412 - protein, 9 aa, Homo sapiens
SSSSSSSSS

SEQ ID NO: 136413 - protein, 9 aa, Homo sapiens
SSSSSSSSS

SEQ ID NO: 136414 - protein, 9 aa, Homo sapiens
SSSSSSSSS

SEQ ID NO: 136415 - protein, 9 aa, Homo sapiens
SSSSSSSSS

SEQ ID NO: 136416 - protein, 9 aa, Homo sapiens
SSSSSSSSS

SEQ ID NO: 136417 - protein, 9 aa, Homo sapiens
SSSSSSSSS

SEQ ID NO: 136418 - protein, 9 aa, Homo sapiens
SSSSSSSSS

SEQ ID NO: 136419 - protein, 9 aa, Homo sapiens
SSSSSSSSS

SEQ ID NO: 136420 - protein, 9 aa, Homo sapiens
SSSSSSSSS

SEQ ID NO: 136421 - protein, 9 aa, Homo sapiens
SSSSSSSSS

SEQ ID NO: 136422 - protein, 9 aa, Homo sapiens
SSSSSSSSS

SEQ ID NO: 136423 - protein, 9 aa, Homo sapiens
SSSSSSSSS

SEQ ID NO: 136424 - protein, 9 aa, Homo sapiens
SSSSSSSSS

SEQ ID NO: 136425 - protein, 9 aa, Homo sapiens
SSSSSSSSS

SEQ ID NO: 136426 - protein, 9 aa, Homo sapiens
SSSSSSSSS

SEQ ID NO: 136427 - protein, 9 aa, Homo sapiens
SSSSSSSSS

SEQ ID NO: 136428 - protein, 9 aa, Homo sapiens
SSSSSSSSS

SEQ ID NO: 136429 - protein, 9 aa, Homo sapiens
SSSSSSSSS

SEQ ID NO: 136430 - protein, 9 aa, Homo sapiens
SSSSSSSSS

SEQ ID NO: 136431 - protein, 9 aa, Homo sapiens
SSSSSSSSS

SEQ ID NO: 136432 - protein, 9 aa, Homo sapiens
SSSSSSSSS

SEQ ID NO: 136433 - protein, 9 aa, Homo sapiens
SSSSSSSSS

SEQ ID NO: 136434 - protein, 9 aa, Homo sapiens
SSSSSSSSP

SEQ ID NO: 136435 - protein, 9 aa, Homo sapiens
SSSSSSSPS

SEQ ID NO: 136436 - protein, 9 aa, Homo sapiens
SSSSSSPSP

SEQ ID NO: 136437 - protein, 9 aa, Homo sapiens
SSSSSPSPA

SEQ ID NO: 136438 - protein, 9 aa, Homo sapiens
SSSSPSPAK

SEQ ID NO: 136439 - protein, 9 aa, Homo sapiens
SSSPSPAKP

SEQ ID NO: 136440 - protein, 9 aa, Homo sapiens
SSPSPAKPG

SEQ ID NO: 136441 - protein, 9 aa, Homo sapiens
SPSPAKPGP

SEQ ID NO: 136442 - protein, 9 aa, Homo sapiens
PSPAKPGPQ

SEQ ID NO: 136443 - protein, 9 aa, Homo sapiens
SPAKPGPQA

SEQ ID NO: 136444 - protein, 9 aa, Homo sapiens
PAKPGPQAL

SEQ ID NO: 136445 - protein, 9 aa, Homo sapiens
AKPGPQALP

SEQ ID NO: 136446 - protein, 9 aa, Homo sapiens
KPGPQALPK

SEQ ID NO: 136447 - protein, 9 aa, Homo sapiens
PGPQALPKP

SEQ ID NO: 136448 - protein, 9 aa, Homo sapiens
GPQALPKPA

SEQ ID NO: 136449 - protein, 9 aa, Homo sapiens
PQALPKPAS

SEQ ID NO: 136450 - protein, 9 aa, Homo sapiens
QALPKPASP

SEQ ID NO: 136451 - protein, 9 aa, Homo sapiens
ALPKPASPK

SEQ ID NO: 136452 - protein, 9 aa, Homo sapiens
LPKPASPKK

SEQ ID NO: 136453 - protein, 9 aa, Homo sapiens
PKPASPKKP

SEQ ID NO: 136454 - protein, 9 aa, Homo sapiens
KPASPKKPP

SEQ ID NO: 136455 - protein, 9 aa, Homo sapiens
PASPKKPPP

SEQ ID NO: 136456 - protein, 9 aa, Homo sapiens
ASPKKPPPG

SEQ ID NO: 136457 - protein, 9 aa, Homo sapiens
SPKKPPPGE

SEQ ID NO: 136458 - protein, 9 aa, Homo sapiens
PKKPPPGER

SEQ ID NO: 136459 - protein, 9 aa, Homo sapiens
KKPPPGERR

SEQ ID NO: 136460 - protein, 9 aa, Homo sapiens
KPPPGERRS

SEQ ID NO: 136461 - protein, 9 aa, Homo sapiens
PPPGERRSR

SEQ ID NO: 136462 - protein, 9 aa, Homo sapiens
PPGERRSRS

SEQ ID NO: 136463 - protein, 9 aa, Homo sapiens
PGERRSRSP

SEQ ID NO: 136464 - protein, 9 aa, Homo sapiens
GERRSRSPR

SEQ ID NO: 136465 - protein, 9 aa, Homo sapiens
ERRSRSPRK

SEQ ID NO: 136466 - protein, 9 aa, Homo sapiens
RRSRSPRKP

SEQ ID NO: 136467 - protein, 9 aa, Homo sapiens
RSRSPRKPI

SEQ ID NO: 136468 - protein, 9 aa, Homo sapiens
SRSPRKPID

SEQ ID NO: 136469 - protein, 9 aa, Homo sapiens
RSPRKPIDS

SEQ ID NO: 136470 - protein, 9 aa, Homo sapiens
SPRKPIDSL

SEQ ID NO: 136471 - protein, 9 aa, Homo sapiens
PRKPIDSLR

SEQ ID NO: 136472 - protein, 9 aa, Homo sapiens
RKPIDSLRD

SEQ ID NO: 136473 - protein, 9 aa, Homo sapiens
KPIDSLRDS

SEQ ID NO: 136474 - protein, 9 aa, Homo sapiens
PIDSLRDSR

SEQ ID NO: 136475 - protein, 9 aa, Homo sapiens
IDSLRDSRS

SEQ ID NO: 136476 - protein, 9 aa, Homo sapiens
DSLRDSRSL

SEQ ID NO: 136477 - protein, 9 aa, Homo sapiens
SLRDSRSLS

SEQ ID NO: 136478 - protein, 9 aa, Homo sapiens
LRDSRSLSY

SEQ ID NO: 136479 - protein, 9 aa, Homo sapiens
RDSRSLSYS

SEQ ID NO: 136480 - protein, 9 aa, Homo sapiens
DSRSLSYSP

SEQ ID NO: 136481 - protein, 9 aa, Homo sapiens
SRSLSYSPV

SEQ ID NO: 136482 - protein, 9 aa, Homo sapiens
RSLSYSPVE

SEQ ID NO: 136483 - protein, 9 aa, Homo sapiens
SLSYSPVER

SEQ ID NO: 136484 - protein, 9 aa, Homo sapiens
LSYSPVERR

SEQ ID NO: 136485 - protein, 9 aa, Homo sapiens
SYSPVERRR

SEQ ID NO: 136486 - protein, 9 aa, Homo sapiens
YSPVERRRP

SEQ ID NO: 136487 - protein, 9 aa, Homo sapiens
SPVERRRPS

SEQ ID NO: 136488 - protein, 9 aa, Homo sapiens
PVERRRPSP

SEQ ID NO: 136489 - protein, 9 aa, Homo sapiens
VERRRPSPQ

SEQ ID NO: 136490 - protein, 9 aa, Homo sapiens
ERRRPSPQP

SEQ ID NO: 136491 - protein, 9 aa, Homo sapiens
RRRPSPQPS

SEQ ID NO: 136492 - protein, 9 aa, Homo sapiens
RRPSPQPSP

SEQ ID NO: 136493 - protein, 9 aa, Homo sapiens
RPSPQPSPR

SEQ ID NO: 136494 - protein, 9 aa, Homo sapiens
PSPQPSPRD

SEQ ID NO: 136495 - protein, 9 aa, Homo sapiens
SPQPSPRDQ

SEQ ID NO: 136496 - protein, 9 aa, Homo sapiens
PQPSPRDQQ

SEQ ID NO: 136497 - protein, 9 aa, Homo sapiens
QPSPRDQQS

SEQ ID NO: 136498 - protein, 9 aa, Homo sapiens
PSPRDQQSS

SEQ ID NO: 136499 - protein, 9 aa, Homo sapiens
SPRDQQSSS

SEQ ID NO: 136500 - protein, 9 aa, Homo sapiens
PRDQQSSSS

SEQ ID NO: 136501 - protein, 9 aa, Homo sapiens
RDQQSSSSE

SEQ ID NO: 136502 - protein, 9 aa, Homo sapiens
DQQSSSSER

SEQ ID NO: 136503 - protein, 9 aa, Homo sapiens
QQSSSSERG

SEQ ID NO: 136504 - protein, 9 aa, Homo sapiens
QSSSSERGS

SEQ ID NO: 136505 - protein, 9 aa, Homo sapiens
SSSSERGSR

SEQ ID NO: 136506 - protein, 9 aa, Homo sapiens
SSSERGSRR

SEQ ID NO: 136507 - protein, 9 aa, Homo sapiens
SSERGSRRG

SEQ ID NO: 136508 - protein, 9 aa, Homo sapiens
SERGSRRGQ

SEQ ID NO: 136509 - protein, 9 aa, Homo sapiens
ERGSRRGQR

SEQ ID NO: 136510 - protein, 9 aa, Homo sapiens
RGSRRGQRG

SEQ ID NO: 136511 - protein, 9 aa, Homo sapiens
GSRRGQRGD

SEQ ID NO: 136512 - protein, 9 aa, Homo sapiens
SRRGQRGDS

SEQ ID NO: 136513 - protein, 9 aa, Homo sapiens
RRGQRGDSR

SEQ ID NO: 136514 - protein, 9 aa, Homo sapiens
RGQRGDSRS

SEQ ID NO: 136515 - protein, 9 aa, Homo sapiens
GQRGDSRSP

SEQ ID NO: 136516 - protein, 9 aa, Homo sapiens
QRGDSRSPS

SEQ ID NO: 136517 - protein, 9 aa, Homo sapiens
RGDSRSPSH

SEQ ID NO: 136518 - protein, 9 aa, Homo sapiens
GDSRSPSHK

SEQ ID NO: 136519 - protein, 9 aa, Homo sapiens
DSRSPSHKR

SEQ ID NO: 136520 - protein, 9 aa, Homo sapiens
SRSPSHKRR

SEQ ID NO: 136521 - protein, 9 aa, Homo sapiens
RSPSHKRRR

SEQ ID NO: 136522 - protein, 9 aa, Homo sapiens
SPSHKRRRE

SEQ ID NO: 136523 - protein, 9 aa, Homo sapiens
PSHKRRRET

SEQ ID NO: 136524 - protein, 9 aa, Homo sapiens
SHKRRRETP

SEQ ID NO: 136525 - protein, 9 aa, Homo sapiens
HKRRRETPS

SEQ ID NO: 136526 - protein, 9 aa, Homo sapiens
KRRRETPSP

SEQ ID NO: 136527 - protein, 9 aa, Homo sapiens
RRRETPSPR

SEQ ID NO: 136528 - protein, 9 aa, Homo sapiens
RRETPSPRP

SEQ ID NO: 136529 - protein, 9 aa, Homo sapiens
RETPSPRPM

SEQ ID NO: 136530 - protein, 9 aa, Homo sapiens
ETPSPRPMR

SEQ ID NO: 136531 - protein, 9 aa, Homo sapiens
TPSPRPMRH

SEQ ID NO: 136532 - protein, 9 aa, Homo sapiens
PSPRPMRHR

SEQ ID NO: 136533 - protein, 9 aa, Homo sapiens
SPRPMRHRS

SEQ ID NO: 136534 - protein, 9 aa, Homo sapiens
PRPMRHRSS

SEQ ID NO: 136535 - protein, 9 aa, Homo sapiens
RPMRHRSSR

SEQ ID NO: 136536 - protein, 9 aa, Homo sapiens
PMRHRSSRS

SEQ ID NO: 136537 - protein, 9 aa, Homo sapiens
MRHRSSRSP

SEQ ID NO: 136538 - protein, 9 aa, Homo sapiens
MWNSGFESY

SEQ ID NO: 136539 - protein, 9 aa, Homo sapiens
WNSGFESYG

SEQ ID NO: 136540 - protein, 9 aa, Homo sapiens
NSGFESYGS

SEQ ID NO: 136541 - protein, 9 aa, Homo sapiens
SGFESYGSS

SEQ ID NO: 136542 - protein, 9 aa, Homo sapiens
GFESYGSSS

SEQ ID NO: 136543 - protein, 9 aa, Homo sapiens
FESYGSSSY

SEQ ID NO: 136544 - protein, 9 aa, Homo sapiens
ESYGSSSYG

SEQ ID NO: 136545 - protein, 9 aa, Homo sapiens
SYGSSSYGG

SEQ ID NO: 136546 - protein, 9 aa, Homo sapiens
YGSSSYGGA

SEQ ID NO: 136547 - protein, 9 aa, Homo sapiens
GSSSYGGAG

SEQ ID NO: 136548 - protein, 9 aa, Homo sapiens
SSSYGGAGG

SEQ ID NO: 136549 - protein, 9 aa, Homo sapiens
SSYGGAGGY

SEQ ID NO: 136550 - protein, 9 aa, Homo sapiens
SYGGAGGYT

SEQ ID NO: 136551 - protein, 9 aa, Homo sapiens
YGGAGGYTQ

SEQ ID NO: 136552 - protein, 9 aa, Homo sapiens
GGAGGYTQS

SEQ ID NO: 136553 - protein, 9 aa, Homo sapiens
GAGGYTQSP

SEQ ID NO: 136554 - protein, 9 aa, Homo sapiens
AGGYTQSPG

SEQ ID NO: 136555 - protein, 9 aa, Homo sapiens
GGYTQSPGG

SEQ ID NO: 136556 - protein, 9 aa, Homo sapiens
GYTQSPGGF

SEQ ID NO: 136557 - protein, 9 aa, Homo sapiens
YTQSPGGFG

SEQ ID NO: 136558 - protein, 9 aa, Homo sapiens
TQSPGGFGS

SEQ ID NO: 136559 - protein, 9 aa, Homo sapiens
QSPGGFGSP

SEQ ID NO: 136560 - protein, 9 aa, Homo sapiens
SPGGFGSPA

SEQ ID NO: 136561 - protein, 9 aa, Homo sapiens
PGGFGSPAP

SEQ ID NO: 136562 - protein, 9 aa, Homo sapiens
GGFGSPAPS

SEQ ID NO: 136563 - protein, 9 aa, Homo sapiens
GFGSPAPSQ

SEQ ID NO: 136564 - protein, 9 aa, Homo sapiens
FGSPAPSQA

SEQ ID NO: 136565 - protein, 9 aa, Homo sapiens
GSPAPSQAE

SEQ ID NO: 136566 - protein, 9 aa, Homo sapiens
SPAPSQAEK

SEQ ID NO: 136567 - protein, 9 aa, Homo sapiens
PAPSQAEKK

SEQ ID NO: 136568 - protein, 9 aa, Homo sapiens
APSQAEKKS

SEQ ID NO: 136569 - protein, 9 aa, Homo sapiens
PSQAEKKSR

SEQ ID NO: 136570 - protein, 9 aa, Homo sapiens
SQAEKKSRA

SEQ ID NO: 136571 - protein, 9 aa, Homo sapiens
QAEKKSRAR

SEQ ID NO: 136572 - protein, 9 aa, Homo sapiens
AEKKSRARA

SEQ ID NO: 136573 - protein, 9 aa, Homo sapiens
EKKSRARAQ

SEQ ID NO: 136574 - protein, 9 aa, Homo sapiens
KKSRARAQH

SEQ ID NO: 136575 - protein, 9 aa, Homo sapiens
KSRARAQHI

SEQ ID NO: 136576 - protein, 9 aa, Homo sapiens
SRARAQHIV

SEQ ID NO: 136577 - protein, 9 aa, Homo sapiens
RARAQHIVP

SEQ ID NO: 136578 - protein, 9 aa, Homo sapiens
ARAQHIVPC

SEQ ID NO: 136579 - protein, 9 aa, Homo sapiens
RAQHIVPCT

SEQ ID NO: 136580 - protein, 9 aa, Homo sapiens
AQHIVPCTI

SEQ ID NO: 136581 - protein, 9 aa, Homo sapiens
QHIVPCTIS

SEQ ID NO: 136582 - protein, 9 aa, Homo sapiens
HIVPCTISQ

SEQ ID NO: 136583 - protein, 9 aa, Homo sapiens
IVPCTISQL

SEQ ID NO: 136584 - protein, 9 aa, Homo sapiens
VPCTISQLL

SEQ ID NO: 136585 - protein, 9 aa, Homo sapiens
PCTISQLLS

SEQ ID NO: 136586 - protein, 9 aa, Homo sapiens
CTISQLLSA

SEQ ID NO: 136587 - protein, 9 aa, Homo sapiens
TISQLLSAT

SEQ ID NO: 136588 - protein, 9 aa, Homo sapiens
ISQLLSATL

SEQ ID NO: 136589 - protein, 9 aa, Homo sapiens
SQLLSATLV

SEQ ID NO: 136590 - protein, 9 aa, Homo sapiens
QLLSATLVD

SEQ ID NO: 136591 - protein, 9 aa, Homo sapiens
LLSATLVDE

SEQ ID NO: 136592 - protein, 9 aa, Homo sapiens
LSATLVDEV

SEQ ID NO: 136593 - protein, 9 aa, Homo sapiens
SATLVDEVF

SEQ ID NO: 136594 - protein, 9 aa, Homo sapiens
ATLVDEVFR

SEQ ID NO: 136595 - protein, 9 aa, Homo sapiens
TLVDEVFRI

SEQ ID NO: 136596 - protein, 9 aa, Homo sapiens
LVDEVFRIG

SEQ ID NO: 136597 - protein, 9 aa, Homo sapiens
VDEVFRIGN

SEQ ID NO: 136598 - protein, 9 aa, Homo sapiens
DEVFRIGNV

SEQ ID NO: 136599 - protein, 9 aa, Homo sapiens
EVFRIGNVE

SEQ ID NO: 136600 - protein, 9 aa, Homo sapiens
VFRIGNVEI

SEQ ID NO: 136601 - protein, 9 aa, Homo sapiens
FRIGNVEIS

SEQ ID NO: 136602 - protein, 9 aa, Homo sapiens
RIGNVEISQ

SEQ ID NO: 136603 - protein, 9 aa, Homo sapiens
IGNVEISQV

SEQ ID NO: 136604 - protein, 9 aa, Homo sapiens
GNVEISQVT

SEQ ID NO: 136605 - protein, 9 aa, Homo sapiens
NVEISQVTI

SEQ ID NO: 136606 - protein, 9 aa, Homo sapiens
VEISQVTIV

SEQ ID NO: 136607 - protein, 9 aa, Homo sapiens
EISQVTIVG

SEQ ID NO: 136608 - protein, 9 aa, Homo sapiens
ISQVTIVGI

SEQ ID NO: 136609 - protein, 9 aa, Homo sapiens
SQVTIVGII

SEQ ID NO: 136610 - protein, 9 aa, Homo sapiens
QVTIVGIIR

SEQ ID NO: 136611 - protein, 9 aa, Homo sapiens
VTIVGIIRH

SEQ ID NO: 136612 - protein, 9 aa, Homo sapiens
TIVGIIRHA

SEQ ID NO: 136613 - protein, 9 aa, Homo sapiens
IVGIIRHAE

SEQ ID NO: 136614 - protein, 9 aa, Homo sapiens
VGIIRHAEK

SEQ ID NO: 136615 - protein, 9 aa, Homo sapiens
GIIRHAEKA

SEQ ID NO: 136616 - protein, 9 aa, Homo sapiens
IIRHAEKAP

SEQ ID NO: 136617 - protein, 9 aa, Homo sapiens
IRHAEKAPT

SEQ ID NO: 136618 - protein, 9 aa, Homo sapiens
RHAEKAPTN

SEQ ID NO: 136619 - protein, 9 aa, Homo sapiens
HAEKAPTNI

SEQ ID NO: 136620 - protein, 9 aa, Homo sapiens
AEKAPTNIV

SEQ ID NO: 136621 - protein, 9 aa, Homo sapiens
EKAPTNIVY

SEQ ID NO: 136622 - protein, 9 aa, Homo sapiens
KAPTNIVYK

SEQ ID NO: 136623 - protein, 9 aa, Homo sapiens
APTNIVYKI

SEQ ID NO: 136624 - protein, 9 aa, Homo sapiens
PTNIVYKID

SEQ ID NO: 136625 - protein, 9 aa, Homo sapiens
TNIVYKIDD

SEQ ID NO: 136626 - protein, 9 aa, Homo sapiens
NIVYKIDDM

SEQ ID NO: 136627 - protein, 9 aa, Homo sapiens
IVYKIDDMT

SEQ ID NO: 136628 - protein, 9 aa, Homo sapiens
VYKIDDMTA

SEQ ID NO: 136629 - protein, 9 aa, Homo sapiens
YKIDDMTAA

SEQ ID NO: 136630 - protein, 9 aa, Homo sapiens
KIDDMTAAP

SEQ ID NO: 136631 - protein, 9 aa, Homo sapiens
IDDMTAAPM

SEQ ID NO: 136632 - protein, 9 aa, Homo sapiens
DDMTAAPMD

SEQ ID NO: 136633 - protein, 9 aa, Homo sapiens
DMTAAPMDV

SEQ ID NO: 136634 - protein, 9 aa, Homo sapiens
MTAAPMDVR

SEQ ID NO: 136635 - protein, 9 aa, Homo sapiens
TAAPMDVRQ

SEQ ID NO: 136636 - protein, 9 aa, Homo sapiens
AAPMDVRQW

SEQ ID NO: 136637 - protein, 9 aa, Homo sapiens
APMDVRQWV

SEQ ID NO: 136638 - protein, 9 aa, Homo sapiens
PMDVRQWVD

SEQ ID NO: 136639 - protein, 9 aa, Homo sapiens
MDVRQWVDT

SEQ ID NO: 136640 - protein, 9 aa, Homo sapiens
DVRQWVDTD

SEQ ID NO: 136641 - protein, 9 aa, Homo sapiens
VRQWVDTDD

SEQ ID NO: 136642 - protein, 9 aa, Homo sapiens
RQWVDTDDT

SEQ ID NO: 136643 - protein, 9 aa, Homo sapiens
QWVDTDDTS

SEQ ID NO: 136644 - protein, 9 aa, Homo sapiens
WVDTDDTSS

SEQ ID NO: 136645 - protein, 9 aa, Homo sapiens
VDTDDTSSE

SEQ ID NO: 136646 - protein, 9 aa, Homo sapiens
DTDDTSSEN

SEQ ID NO: 136647 - protein, 9 aa, Homo sapiens
TDDTSSENT

SEQ ID NO: 136648 - protein, 9 aa, Homo sapiens
DDTSSENTV

SEQ ID NO: 136649 - protein, 9 aa, Homo sapiens
DTSSENTVV

SEQ ID NO: 136650 - protein, 9 aa, Homo sapiens
TSSENTVVP

SEQ ID NO: 136651 - protein, 9 aa, Homo sapiens
SSENTVVPP

SEQ ID NO: 136652 - protein, 9 aa, Homo sapiens
SENTVVPPE

SEQ ID NO: 136653 - protein, 9 aa, Homo sapiens
ENTVVPPET

SEQ ID NO: 136654 - protein, 9 aa, Homo sapiens
NTVVPPETY

SEQ ID NO: 136655 - protein, 9 aa, Homo sapiens
TVVPPETYV

SEQ ID NO: 136656 - protein, 9 aa, Homo sapiens
VVPPETYVK

SEQ ID NO: 136657 - protein, 9 aa, Homo sapiens
VPPETYVKV

SEQ ID NO: 136658 - protein, 9 aa, Homo sapiens
PPETYVKVA

SEQ ID NO: 136659 - protein, 9 aa, Homo sapiens
PETYVKVAG

SEQ ID NO: 136660 - protein, 9 aa, Homo sapiens
ETYVKVAGH

SEQ ID NO: 136661 - protein, 9 aa, Homo sapiens
TYVKVAGHL

SEQ ID NO: 136662 - protein, 9 aa, Homo sapiens
YVKVAGHLR

SEQ ID NO: 136663 - protein, 9 aa, Homo sapiens
VKVAGHLRS

SEQ ID NO: 136664 - protein, 9 aa, Homo sapiens
KVAGHLRSF

SEQ ID NO: 136665 - protein, 9 aa, Homo sapiens
VAGHLRSFQ

SEQ ID NO: 136666 - protein, 9 aa, Homo sapiens
AGHLRSFQN

SEQ ID NO: 136667 - protein, 9 aa, Homo sapiens
GHLRSFQNK

SEQ ID NO: 136668 - protein, 9 aa, Homo sapiens
HLRSFQNKK

SEQ ID NO: 136669 - protein, 9 aa, Homo sapiens
LRSFQNKKS

SEQ ID NO: 136670 - protein, 9 aa, Homo sapiens
RSFQNKKSL

SEQ ID NO: 136671 - protein, 9 aa, Homo sapiens
SFQNKKSLV

SEQ ID NO: 136672 - protein, 9 aa, Homo sapiens
FQNKKSLVA

SEQ ID NO: 136673 - protein, 9 aa, Homo sapiens
QNKKSLVAF

SEQ ID NO: 136674 - protein, 9 aa, Homo sapiens
NKKSLVAFK

SEQ ID NO: 136675 - protein, 9 aa, Homo sapiens
KKSLVAFKI

SEQ ID NO: 136676 - protein, 9 aa, Homo sapiens
KSLVAFKIM

SEQ ID NO: 136677 - protein, 9 aa, Homo sapiens
SLVAFKIMP

SEQ ID NO: 136678 - protein, 9 aa, Homo sapiens
LVAFKIMPL

SEQ ID NO: 136679 - protein, 9 aa, Homo sapiens
VAFKIMPLE

SEQ ID NO: 136680 - protein, 9 aa, Homo sapiens
AFKIMPLED

SEQ ID NO: 136681 - protein, 9 aa, Homo sapiens
FKIMPLEDM

SEQ ID NO: 136682 - protein, 9 aa, Homo sapiens
KIMPLEDMN

SEQ ID NO: 136683 - protein, 9 aa, Homo sapiens
IMPLEDMNE

SEQ ID NO: 136684 - protein, 9 aa, Homo sapiens
MPLEDMNEF

SEQ ID NO: 136685 - protein, 9 aa, Homo sapiens
PLEDMNEFT

SEQ ID NO: 136686 - protein, 9 aa, Homo sapiens
LEDMNEFTT

SEQ ID NO: 136687 - protein, 9 aa, Homo sapiens
EDMNEFTTH

SEQ ID NO: 136688 - protein, 9 aa, Homo sapiens
DMNEFTTHI

SEQ ID NO: 136689 - protein, 9 aa, Homo sapiens
MNEFTTHIL

SEQ ID NO: 136690 - protein, 9 aa, Homo sapiens
NEFTTHILE

SEQ ID NO: 136691 - protein, 9 aa, Homo sapiens
EFTTHILEV

SEQ ID NO: 136692 - protein, 9 aa, Homo sapiens
FTTHILEVI

SEQ ID NO: 136693 - protein, 9 aa, Homo sapiens
TTHILEVIN

SEQ ID NO: 136694 - protein, 9 aa, Homo sapiens
THILEVINA

SEQ ID NO: 136695 - protein, 9 aa, Homo sapiens
HILEVINAH

SEQ ID NO: 136696 - protein, 9 aa, Homo sapiens
ILEVINAHM

SEQ ID NO: 136697 - protein, 9 aa, Homo sapiens
LEVINAHMV

SEQ ID NO: 136698 - protein, 9 aa, Homo sapiens
EVINAHMVL

SEQ ID NO: 136699 - protein, 9 aa, Homo sapiens
VINAHMVLS

SEQ ID NO: 136700 - protein, 9 aa, Homo sapiens
INAHMVLSK

SEQ ID NO: 136701 - protein, 9 aa, Homo sapiens
NAHMVLSKA

SEQ ID NO: 136702 - protein, 9 aa, Homo sapiens
AHMVLSKAN

SEQ ID NO: 136703 - protein, 9 aa, Homo sapiens
HMVLSKANS

SEQ ID NO: 136704 - protein, 9 aa, Homo sapiens
MVLSKANSQ

SEQ ID NO: 136705 - protein, 9 aa, Homo sapiens
VLSKANSQP

SEQ ID NO: 136706 - protein, 9 aa, Homo sapiens
LSKANSQPS

SEQ ID NO: 136707 - protein, 9 aa, Homo sapiens
SKANSQPSA

SEQ ID NO: 136708 - protein, 9 aa, Homo sapiens
KANSQPSAG

SEQ ID NO: 136709 - protein, 9 aa, Homo sapiens
ANSQPSAGR

SEQ ID NO: 136710 - protein, 9 aa, Homo sapiens
NSQPSAGRA

SEQ ID NO: 136711 - protein, 9 aa, Homo sapiens
SQPSAGRAP

SEQ ID NO: 136712 - protein, 9 aa, Homo sapiens
QPSAGRAPI

SEQ ID NO: 136713 - protein, 9 aa, Homo sapiens
PSAGRAPIS

SEQ ID NO: 136714 - protein, 9 aa, Homo sapiens
SAGRAPISN

SEQ ID NO: 136715 - protein, 9 aa, Homo sapiens
AGRAPISNP

SEQ ID NO: 136716 - protein, 9 aa, Homo sapiens
GRAPISNPG

SEQ ID NO: 136717 - protein, 9 aa, Homo sapiens
RAPISNPGM

SEQ ID NO: 136718 - protein, 9 aa, Homo sapiens
APISNPGMS

SEQ ID NO: 136719 - protein, 9 aa, Homo sapiens
PISNPGMSE

SEQ ID NO: 136720 - protein, 9 aa, Homo sapiens
ISNPGMSEA

SEQ ID NO: 136721 - protein, 9 aa, Homo sapiens
SNPGMSEAG

SEQ ID NO: 136722 - protein, 9 aa, Homo sapiens
NPGMSEAGN

SEQ ID NO: 136723 - protein, 9 aa, Homo sapiens
PGMSEAGNF

SEQ ID NO: 136724 - protein, 9 aa, Homo sapiens
GMSEAGNFG

SEQ ID NO: 136725 - protein, 9 aa, Homo sapiens
MSEAGNFGG

SEQ ID NO: 136726 - protein, 9 aa, Homo sapiens
SEAGNFGGN

SEQ ID NO: 136727 - protein, 9 aa, Homo sapiens
EAGNFGGNS

SEQ ID NO: 136728 - protein, 9 aa, Homo sapiens
AGNFGGNSF

SEQ ID NO: 136729 - protein, 9 aa, Homo sapiens
GNFGGNSFM

SEQ ID NO: 136730 - protein, 9 aa, Homo sapiens
NFGGNSFMP

SEQ ID NO: 136731 - protein, 9 aa, Homo sapiens
FGGNSFMPA

SEQ ID NO: 136732 - protein, 9 aa, Homo sapiens
GGNSFMPAN

SEQ ID NO: 136733 - protein, 9 aa, Homo sapiens
GNSFMPANG

SEQ ID NO: 136734 - protein, 9 aa, Homo sapiens
NSFMPANGL

SEQ ID NO: 136735 - protein, 9 aa, Homo sapiens
SFMPANGLT

SEQ ID NO: 136736 - protein, 9 aa, Homo sapiens
FMPANGLTV

SEQ ID NO: 136737 - protein, 9 aa, Homo sapiens
MPANGLTVA

SEQ ID NO: 136738 - protein, 9 aa, Homo sapiens
PANGLTVAQ

SEQ ID NO: 136739 - protein, 9 aa, Homo sapiens
ANGLTVAQN

SEQ ID NO: 136740 - protein, 9 aa, Homo sapiens
NGLTVAQNQ

SEQ ID NO: 136741 - protein, 9 aa, Homo sapiens
GLTVAQNQV

SEQ ID NO: 136742 - protein, 9 aa, Homo sapiens
LTVAQNQVL

SEQ ID NO: 136743 - protein, 9 aa, Homo sapiens
TVAQNQVLN

SEQ ID NO: 136744 - protein, 9 aa, Homo sapiens
VAQNQVLNL

SEQ ID NO: 136745 - protein, 9 aa, Homo sapiens
AQNQVLNLI

SEQ ID NO: 136746 - protein, 9 aa, Homo sapiens
QNQVLNLIK

SEQ ID NO: 136747 - protein, 9 aa, Homo sapiens
NQVLNLIKA

SEQ ID NO: 136748 - protein, 9 aa, Homo sapiens
QVLNLIKAC

SEQ ID NO: 136749 - protein, 9 aa, Homo sapiens
VLNLIKACP

SEQ ID NO: 136750 - protein, 9 aa, Homo sapiens
LNLIKACPR

SEQ ID NO: 136751 - protein, 9 aa, Homo sapiens
NLIKACPRP

SEQ ID NO: 136752 - protein, 9 aa, Homo sapiens
LIKACPRPE

SEQ ID NO: 136753 - protein, 9 aa, Homo sapiens
IKACPRPEG

SEQ ID NO: 136754 - protein, 9 aa, Homo sapiens
KACPRPEGL

SEQ ID NO: 136755 - protein, 9 aa, Homo sapiens
ACPRPEGLN

SEQ ID NO: 136756 - protein, 9 aa, Homo sapiens
CPRPEGLNF

SEQ ID NO: 136757 - protein, 9 aa, Homo sapiens
PRPEGLNFQ

SEQ ID NO: 136758 - protein, 9 aa, Homo sapiens
RPEGLNFQD

SEQ ID NO: 136759 - protein, 9 aa, Homo sapiens
PEGLNFQDL

SEQ ID NO: 136760 - protein, 9 aa, Homo sapiens
EGLNFQDLK

SEQ ID NO: 136761 - protein, 9 aa, Homo sapiens
GLNFQDLKN

SEQ ID NO: 136762 - protein, 9 aa, Homo sapiens
LNFQDLKNQ

SEQ ID NO: 136763 - protein, 9 aa, Homo sapiens
NFQDLKNQL

SEQ ID NO: 136764 - protein, 9 aa, Homo sapiens
FQDLKNQLK

SEQ ID NO: 136765 - protein, 9 aa, Homo sapiens
QDLKNQLKH

SEQ ID NO: 136766 - protein, 9 aa, Homo sapiens
DLKNQLKHM

SEQ ID NO: 136767 - protein, 9 aa, Homo sapiens
LKNQLKHMS

SEQ ID NO: 136768 - protein, 9 aa, Homo sapiens
KNQLKHMSV

SEQ ID NO: 136769 - protein, 9 aa, Homo sapiens
NQLKHMSVS

SEQ ID NO: 136770 - protein, 9 aa, Homo sapiens
QLKHMSVSS

SEQ ID NO: 136771 - protein, 9 aa, Homo sapiens
LKHMSVSSI

SEQ ID NO: 136772 - protein, 9 aa, Homo sapiens
KHMSVSSIK

SEQ ID NO: 136773 - protein, 9 aa, Homo sapiens
HMSVSSIKQ

SEQ ID NO: 136774 - protein, 9 aa, Homo sapiens
MSVSSIKQA

SEQ ID NO: 136775 - protein, 9 aa, Homo sapiens
SVSSIKQAV

SEQ ID NO: 136776 - protein, 9 aa, Homo sapiens
VSSIKQAVD

SEQ ID NO: 136777 - protein, 9 aa, Homo sapiens
SSIKQAVDF

SEQ ID NO: 136778 - protein, 9 aa, Homo sapiens
SIKQAVDFL

SEQ ID NO: 136779 - protein, 9 aa, Homo sapiens
IKQAVDFLS

SEQ ID NO: 136780 - protein, 9 aa, Homo sapiens
KQAVDFLSN

SEQ ID NO: 136781 - protein, 9 aa, Homo sapiens
QAVDFLSNE

SEQ ID NO: 136782 - protein, 9 aa, Homo sapiens
AVDFLSNEG

SEQ ID NO: 136783 - protein, 9 aa, Homo sapiens
VDFLSNEGH

SEQ ID NO: 136784 - protein, 9 aa, Homo sapiens
DFLSNEGHI

SEQ ID NO: 136785 - protein, 9 aa, Homo sapiens
FLSNEGHIY

SEQ ID NO: 136786 - protein, 9 aa, Homo sapiens
LSNEGHIYS

SEQ ID NO: 136787 - protein, 9 aa, Homo sapiens
SNEGHIYST

SEQ ID NO: 136788 - protein, 9 aa, Homo sapiens
NEGHIYSTV

SEQ ID NO: 136789 - protein, 9 aa, Homo sapiens
EGHIYSTVD

SEQ ID NO: 136790 - protein, 9 aa, Homo sapiens
GHIYSTVDD

SEQ ID NO: 136791 - protein, 9 aa, Homo sapiens
HIYSTVDDD

SEQ ID NO: 136792 - protein, 9 aa, Homo sapiens
IYSTVDDDH

SEQ ID NO: 136793 - protein, 9 aa, Homo sapiens
YSTVDDDHF

SEQ ID NO: 136794 - protein, 9 aa, Homo sapiens
STVDDDHFK

SEQ ID NO: 136795 - protein, 9 aa, Homo sapiens
TVDDDHFKS

SEQ ID NO: 136796 - protein, 9 aa, Homo sapiens
VDDDHFKST

SEQ ID NO: 136797 - protein, 9 aa, Homo sapiens
DDDHFKSTD

SEQ ID NO: 136798 - protein, 9 aa, Homo sapiens
DDHFKSTDA

SEQ ID NO: 136799 - protein, 9 aa, Homo sapiens
DHFKSTDAE

SEQ ID NO: 136800 - protein, 9 aa, Homo sapiens
MPRAPRCRA

SEQ ID NO: 136801 - protein, 9 aa, Homo sapiens
PRAPRCRAV

SEQ ID NO: 136802 - protein, 9 aa, Homo sapiens
RAPRCRAVR

SEQ ID NO: 136803 - protein, 9 aa, Homo sapiens
APRCRAVRS

SEQ ID NO: 136804 - protein, 9 aa, Homo sapiens
PRCRAVRSL

SEQ ID NO: 136805 - protein, 9 aa, Homo sapiens
RCRAVRSLL

SEQ ID NO: 136806 - protein, 9 aa, Homo sapiens
CRAVRSLLR

SEQ ID NO: 136807 - protein, 9 aa, Homo sapiens
RAVRSLLRS

SEQ ID NO: 136808 - protein, 9 aa, Homo sapiens
AVRSLLRSH

SEQ ID NO: 136809 - protein, 9 aa, Homo sapiens
VRSLLRSHY

SEQ ID NO: 136810 - protein, 9 aa, Homo sapiens
RSLLRSHYR

SEQ ID NO: 136811 - protein, 9 aa, Homo sapiens
SLLRSHYRE

SEQ ID NO: 136812 - protein, 9 aa, Homo sapiens
LLRSHYREV

SEQ ID NO: 136813 - protein, 9 aa, Homo sapiens
LRSHYREVL

SEQ ID NO: 136814 - protein, 9 aa, Homo sapiens
RSHYREVLP

SEQ ID NO: 136815 - protein, 9 aa, Homo sapiens
SHYREVLPL

SEQ ID NO: 136816 - protein, 9 aa, Homo sapiens
HYREVLPLA

SEQ ID NO: 136817 - protein, 9 aa, Homo sapiens
YREVLPLAT

SEQ ID NO: 136818 - protein, 9 aa, Homo sapiens
REVLPLATF

SEQ ID NO: 136819 - protein, 9 aa, Homo sapiens
EVLPLATFV

SEQ ID NO: 136820 - protein, 9 aa, Homo sapiens
VLPLATFVR

SEQ ID NO: 136821 - protein, 9 aa, Homo sapiens
LPLATFVRR

SEQ ID NO: 136822 - protein, 9 aa, Homo sapiens
PLATFVRRL

SEQ ID NO: 136823 - protein, 9 aa, Homo sapiens
LATFVRRLG

SEQ ID NO: 136824 - protein, 9 aa, Homo sapiens
ATFVRRLGP

SEQ ID NO: 136825 - protein, 9 aa, Homo sapiens
TFVRRLGPQ

SEQ ID NO: 136826 - protein, 9 aa, Homo sapiens
FVRRLGPQG

SEQ ID NO: 136827 - protein, 9 aa, Homo sapiens
VRRLGPQGW

SEQ ID NO: 136828 - protein, 9 aa, Homo sapiens
RRLGPQGWR

SEQ ID NO: 136829 - protein, 9 aa, Homo sapiens
RLGPQGWRL

SEQ ID NO: 136830 - protein, 9 aa, Homo sapiens
LGPQGWRLV

SEQ ID NO: 136831 - protein, 9 aa, Homo sapiens
GPQGWRLVQ

SEQ ID NO: 136832 - protein, 9 aa, Homo sapiens
PQGWRLVQR

SEQ ID NO: 136833 - protein, 9 aa, Homo sapiens
QGWRLVQRG

SEQ ID NO: 136834 - protein, 9 aa, Homo sapiens
GWRLVQRGD

SEQ ID NO: 136835 - protein, 9 aa, Homo sapiens
WRLVQRGDP

SEQ ID NO: 136836 - protein, 9 aa, Homo sapiens
RLVQRGDPA

SEQ ID NO: 136837 - protein, 9 aa, Homo sapiens
LVQRGDPAA

SEQ ID NO: 136838 - protein, 9 aa, Homo sapiens
VQRGDPAAF

SEQ ID NO: 136839 - protein, 9 aa, Homo sapiens
QRGDPAAFR

SEQ ID NO: 136840 - protein, 9 aa, Homo sapiens
RGDPAAFRA

SEQ ID NO: 136841 - protein, 9 aa, Homo sapiens
GDPAAFRAL

SEQ ID NO: 136842 - protein, 9 aa, Homo sapiens
DPAAFRALV

SEQ ID NO: 136843 - protein, 9 aa, Homo sapiens
PAAFRALVA

SEQ ID NO: 136844 - protein, 9 aa, Homo sapiens
AAFRALVAQ

SEQ ID NO: 136845 - protein, 9 aa, Homo sapiens
AFRALVAQC

SEQ ID NO: 136846 - protein, 9 aa, Homo sapiens
FRALVAQCL

SEQ ID NO: 136847 - protein, 9 aa, Homo sapiens
RALVAQCLV

SEQ ID NO: 136848 - protein, 9 aa, Homo sapiens
ALVAQCLVC

SEQ ID NO: 136849 - protein, 9 aa, Homo sapiens
LVAQCLVCV

SEQ ID NO: 136850 - protein, 9 aa, Homo sapiens
VAQCLVCVP

SEQ ID NO: 136851 - protein, 9 aa, Homo sapiens
AQCLVCVPW

SEQ ID NO: 136852 - protein, 9 aa, Homo sapiens
QCLVCVPWD

SEQ ID NO: 136853 - protein, 9 aa, Homo sapiens
CLVCVPWDA

SEQ ID NO: 136854 - protein, 9 aa, Homo sapiens
LVCVPWDAR

SEQ ID NO: 136855 - protein, 9 aa, Homo sapiens
VCVPWDARP

SEQ ID NO: 136856 - protein, 9 aa, Homo sapiens
CVPWDARPP

SEQ ID NO: 136857 - protein, 9 aa, Homo sapiens
VPWDARPPP

SEQ ID NO: 136858 - protein, 9 aa, Homo sapiens
PWDARPPPA

SEQ ID NO: 136859 - protein, 9 aa, Homo sapiens
WDARPPPAA

SEQ ID NO: 136860 - protein, 9 aa, Homo sapiens
DARPPPAAP

SEQ ID NO: 136861 - protein, 9 aa, Homo sapiens
ARPPPAAPS

SEQ ID NO: 136862 - protein, 9 aa, Homo sapiens
RPPPAAPSF

SEQ ID NO: 136863 - protein, 9 aa, Homo sapiens
PPPAAPSFR

SEQ ID NO: 136864 - protein, 9 aa, Homo sapiens
PPAAPSFRQ

SEQ ID NO: 136865 - protein, 9 aa, Homo sapiens
PAAPSFRQV

SEQ ID NO: 136866 - protein, 9 aa, Homo sapiens
AAPSFRQVS

SEQ ID NO: 136867 - protein, 9 aa, Homo sapiens
APSFRQVSC

SEQ ID NO: 136868 - protein, 9 aa, Homo sapiens
PSFRQVSCL

SEQ ID NO: 136869 - protein, 9 aa, Homo sapiens
SFRQVSCLK

SEQ ID NO: 136870 - protein, 9 aa, Homo sapiens
FRQVSCLKE

SEQ ID NO: 136871 - protein, 9 aa, Homo sapiens
RQVSCLKEL

SEQ ID NO: 136872 - protein, 9 aa, Homo sapiens
QVSCLKELV

SEQ ID NO: 136873 - protein, 9 aa, Homo sapiens
VSCLKELVA

SEQ ID NO: 136874 - protein, 9 aa, Homo sapiens
SCLKELVAR

SEQ ID NO: 136875 - protein, 9 aa, Homo sapiens
CLKELVARV

SEQ ID NO: 136876 - protein, 9 aa, Homo sapiens
LKELVARVL

SEQ ID NO: 136877 - protein, 9 aa, Homo sapiens
KELVARVLQ

SEQ ID NO: 136878 - protein, 9 aa, Homo sapiens
ELVARVLQR

SEQ ID NO: 136879 - protein, 9 aa, Homo sapiens
LVARVLQRL

SEQ ID NO: 136880 - protein, 9 aa, Homo sapiens
VARVLQRLC

SEQ ID NO: 136881 - protein, 9 aa, Homo sapiens
ARVLQRLCE

SEQ ID NO: 136882 - protein, 9 aa, Homo sapiens
RVLQRLCER

SEQ ID NO: 136883 - protein, 9 aa, Homo sapiens
VLQRLCERG

SEQ ID NO: 136884 - protein, 9 aa, Homo sapiens
LQRLCERGA

SEQ ID NO: 136885 - protein, 9 aa, Homo sapiens
QRLCERGAK

SEQ ID NO: 136886 - protein, 9 aa, Homo sapiens
RLCERGAKN

SEQ ID NO: 136887 - protein, 9 aa, Homo sapiens
LCERGAKNV

SEQ ID NO: 136888 - protein, 9 aa, Homo sapiens
CERGAKNVL

SEQ ID NO: 136889 - protein, 9 aa, Homo sapiens
ERGAKNVLA

SEQ ID NO: 136890 - protein, 9 aa, Homo sapiens
RGAKNVLAF

SEQ ID NO: 136891 - protein, 9 aa, Homo sapiens
GAKNVLAFG

SEQ ID NO: 136892 - protein, 9 aa, Homo sapiens
AKNVLAFGF

SEQ ID NO: 136893 - protein, 9 aa, Homo sapiens
KNVLAFGFA

SEQ ID NO: 136894 - protein, 9 aa, Homo sapiens
NVLAFGFAL

SEQ ID NO: 136895 - protein, 9 aa, Homo sapiens
VLAFGFALL

SEQ ID NO: 136896 - protein, 9 aa, Homo sapiens
LAFGFALLD

SEQ ID NO: 136897 - protein, 9 aa, Homo sapiens
AFGFALLDG

SEQ ID NO: 136898 - protein, 9 aa, Homo sapiens
FGFALLDGA

SEQ ID NO: 136899 - protein, 9 aa, Homo sapiens
GFALLDGAR

SEQ ID NO: 136900 - protein, 9 aa, Homo sapiens
FALLDGARG

SEQ ID NO: 136901 - protein, 9 aa, Homo sapiens
ALLDGARGG

SEQ ID NO: 136902 - protein, 9 aa, Homo sapiens
LLDGARGGP

SEQ ID NO: 136903 - protein, 9 aa, Homo sapiens
LDGARGGPP

SEQ ID NO: 136904 - protein, 9 aa, Homo sapiens
DGARGGPPE

SEQ ID NO: 136905 - protein, 9 aa, Homo sapiens
GARGGPPEA

SEQ ID NO: 136906 - protein, 9 aa, Homo sapiens
ARGGPPEAF

SEQ ID NO: 136907 - protein, 9 aa, Homo sapiens
RGGPPEAFT

SEQ ID NO: 136908 - protein, 9 aa, Homo sapiens
GGPPEAFTT

SEQ ID NO: 136909 - protein, 9 aa, Homo sapiens
GPPEAFTTS

SEQ ID NO: 136910 - protein, 9 aa, Homo sapiens
PPEAFTTSV

SEQ ID NO: 136911 - protein, 9 aa, Homo sapiens
PEAFTTSVR

SEQ ID NO: 136912 - protein, 9 aa, Homo sapiens
EAFTTSVRS

SEQ ID NO: 136913 - protein, 9 aa, Homo sapiens
AFTTSVRSY

SEQ ID NO: 136914 - protein, 9 aa, Homo sapiens
FTTSVRSYL

SEQ ID NO: 136915 - protein, 9 aa, Homo sapiens
TTSVRSYLP

SEQ ID NO: 136916 - protein, 9 aa, Homo sapiens
TSVRSYLPN

SEQ ID NO: 136917 - protein, 9 aa, Homo sapiens
SVRSYLPNT

SEQ ID NO: 136918 - protein, 9 aa, Homo sapiens
VRSYLPNTV

SEQ ID NO: 136919 - protein, 9 aa, Homo sapiens
RSYLPNTVT

SEQ ID NO: 136920 - protein, 9 aa, Homo sapiens
SYLPNTVTD

SEQ ID NO: 136921 - protein, 9 aa, Homo sapiens
YLPNTVTDA

SEQ ID NO: 136922 - protein, 9 aa, Homo sapiens
LPNTVTDAL

SEQ ID NO: 136923 - protein, 9 aa, Homo sapiens
PNTVTDALR

SEQ ID NO: 136924 - protein, 9 aa, Homo sapiens
NTVTDALRG

SEQ ID NO: 136925 - protein, 9 aa, Homo sapiens
TVTDALRGS

SEQ ID NO: 136926 - protein, 9 aa, Homo sapiens
VTDALRGSG

SEQ ID NO: 136927 - protein, 9 aa, Homo sapiens
TDALRGSGA

SEQ ID NO: 136928 - protein, 9 aa, Homo sapiens
DALRGSGAW

SEQ ID NO: 136929 - protein, 9 aa, Homo sapiens
ALRGSGAWG

SEQ ID NO: 136930 - protein, 9 aa, Homo sapiens
LRGSGAWGL

SEQ ID NO: 136931 - protein, 9 aa, Homo sapiens
RGSGAWGLL

SEQ ID NO: 136932 - protein, 9 aa, Homo sapiens
GSGAWGLLL

SEQ ID NO: 136933 - protein, 9 aa, Homo sapiens
SGAWGLLLR

SEQ ID NO: 136934 - protein, 9 aa, Homo sapiens
GAWGLLLRR

SEQ ID NO: 136935 - protein, 9 aa, Homo sapiens
AWGLLLRRV

SEQ ID NO: 136936 - protein, 9 aa, Homo sapiens
WGLLLRRVG

SEQ ID NO: 136937 - protein, 9 aa, Homo sapiens
GLLLRRVGD

SEQ ID NO: 136938 - protein, 9 aa, Homo sapiens
LLLRRVGDD

SEQ ID NO: 136939 - protein, 9 aa, Homo sapiens
LLRRVGDDV

SEQ ID NO: 136940 - protein, 9 aa, Homo sapiens
LRRVGDDVL

SEQ ID NO: 136941 - protein, 9 aa, Homo sapiens
RRVGDDVLV

SEQ ID NO: 136942 - protein, 9 aa, Homo sapiens
RVGDDVLVH

SEQ ID NO: 136943 - protein, 9 aa, Homo sapiens
VGDDVLVHL

SEQ ID NO: 136944 - protein, 9 aa, Homo sapiens
GDDVLVHLL

SEQ ID NO: 136945 - protein, 9 aa, Homo sapiens
DDVLVHLLA

SEQ ID NO: 136946 - protein, 9 aa, Homo sapiens
DVLVHLLAR

SEQ ID NO: 136947 - protein, 9 aa, Homo sapiens
VLVHLLARC

SEQ ID NO: 136948 - protein, 9 aa, Homo sapiens
LVHLLARCA

SEQ ID NO: 136949 - protein, 9 aa, Homo sapiens
VHLLARCAL

SEQ ID NO: 136950 - protein, 9 aa, Homo sapiens
HLLARCALF

SEQ ID NO: 136951 - protein, 9 aa, Homo sapiens
LLARCALFV

SEQ ID NO: 136952 - protein, 9 aa, Homo sapiens
LARCALFVL

SEQ ID NO: 136953 - protein, 9 aa, Homo sapiens
ARCALFVLV

SEQ ID NO: 136954 - protein, 9 aa, Homo sapiens
RCALFVLVA

SEQ ID NO: 136955 - protein, 9 aa, Homo sapiens
CALFVLVAP

SEQ ID NO: 136956 - protein, 9 aa, Homo sapiens
ALFVLVAPS

SEQ ID NO: 136957 - protein, 9 aa, Homo sapiens
LFVLVAPSC

SEQ ID NO: 136958 - protein, 9 aa, Homo sapiens
FVLVAPSCA

SEQ ID NO: 136959 - protein, 9 aa, Homo sapiens
VLVAPSCAY

SEQ ID NO: 136960 - protein, 9 aa, Homo sapiens
LVAPSCAYQ

SEQ ID NO: 136961 - protein, 9 aa, Homo sapiens
VAPSCAYQV

SEQ ID NO: 136962 - protein, 9 aa, Homo sapiens
APSCAYQVC

SEQ ID NO: 136963 - protein, 9 aa, Homo sapiens
PSCAYQVCG

SEQ ID NO: 136964 - protein, 9 aa, Homo sapiens
SCAYQVCGP

SEQ ID NO: 136965 - protein, 9 aa, Homo sapiens
CAYQVCGPP

SEQ ID NO: 136966 - protein, 9 aa, Homo sapiens
AYQVCGPPL

SEQ ID NO: 136967 - protein, 9 aa, Homo sapiens
YQVCGPPLY

SEQ ID NO: 136968 - protein, 9 aa, Homo sapiens
QVCGPPLYQ

SEQ ID NO: 136969 - protein, 9 aa, Homo sapiens
VCGPPLYQL

SEQ ID NO: 136970 - protein, 9 aa, Homo sapiens
CGPPLYQLG

SEQ ID NO: 136971 - protein, 9 aa, Homo sapiens
GPPLYQLGA

SEQ ID NO: 136972 - protein, 9 aa, Homo sapiens
PPLYQLGAA

SEQ ID NO: 136973 - protein, 9 aa, Homo sapiens
PLYQLGAAT

SEQ ID NO: 136974 - protein, 9 aa, Homo sapiens
LYQLGAATQ

SEQ ID NO: 136975 - protein, 9 aa, Homo sapiens
YQLGAATQA

SEQ ID NO: 136976 - protein, 9 aa, Homo sapiens
QLGAATQAR

SEQ ID NO: 136977 - protein, 9 aa, Homo sapiens
LGAATQARP

SEQ ID NO: 136978 - protein, 9 aa, Homo sapiens
GAATQARPP

SEQ ID NO: 136979 - protein, 9 aa, Homo sapiens
AATQARPPP

SEQ ID NO: 136980 - protein, 9 aa, Homo sapiens
ATQARPPPH

SEQ ID NO: 136981 - protein, 9 aa, Homo sapiens
TQARPPPHA

SEQ ID NO: 136982 - protein, 9 aa, Homo sapiens
QARPPPHAS

SEQ ID NO: 136983 - protein, 9 aa, Homo sapiens
ARPPPHASG

SEQ ID NO: 136984 - protein, 9 aa, Homo sapiens
RPPPHASGP

SEQ ID NO: 136985 - protein, 9 aa, Homo sapiens
PPPHASGPR

SEQ ID NO: 136986 - protein, 9 aa, Homo sapiens
PPHASGPRR

SEQ ID NO: 136987 - protein, 9 aa, Homo sapiens
PHASGPRRR

SEQ ID NO: 136988 - protein, 9 aa, Homo sapiens
HASGPRRRL

SEQ ID NO: 136989 - protein, 9 aa, Homo sapiens
ASGPRRRLG

SEQ ID NO: 136990 - protein, 9 aa, Homo sapiens
SGPRRRLGC

SEQ ID NO: 136991 - protein, 9 aa, Homo sapiens
GPRRRLGCE

SEQ ID NO: 136992 - protein, 9 aa, Homo sapiens
PRRRLGCER

SEQ ID NO: 136993 - protein, 9 aa, Homo sapiens
RRRLGCERA

SEQ ID NO: 136994 - protein, 9 aa, Homo sapiens
RRLGCERAW

SEQ ID NO: 136995 - protein, 9 aa, Homo sapiens
RLGCERAWN

SEQ ID NO: 136996 - protein, 9 aa, Homo sapiens
LGCERAWNH

SEQ ID NO: 136997 - protein, 9 aa, Homo sapiens
GCERAWNHS

SEQ ID NO: 136998 - protein, 9 aa, Homo sapiens
CERAWNHSV

SEQ ID NO: 136999 - protein, 9 aa, Homo sapiens
ERAWNHSVR

SEQ ID NO: 137000 - protein, 9 aa, Homo sapiens
RAWNHSVRE

SEQ ID NO: 137001 - protein, 9 aa, Homo sapiens
AWNHSVREA

SEQ ID NO: 137002 - protein, 9 aa, Homo sapiens
WNHSVREAG

SEQ ID NO: 137003 - protein, 9 aa, Homo sapiens
NHSVREAGV

SEQ ID NO: 137004 - protein, 9 aa, Homo sapiens
HSVREAGVP

SEQ ID NO: 137005 - protein, 9 aa, Homo sapiens
SVREAGVPL

SEQ ID NO: 137006 - protein, 9 aa, Homo sapiens
VREAGVPLG

SEQ ID NO: 137007 - protein, 9 aa, Homo sapiens
REAGVPLGL

SEQ ID NO: 137008 - protein, 9 aa, Homo sapiens
EAGVPLGLP

SEQ ID NO: 137009 - protein, 9 aa, Homo sapiens
AGVPLGLPA

SEQ ID NO: 137010 - protein, 9 aa, Homo sapiens
GVPLGLPAP

SEQ ID NO: 137011 - protein, 9 aa, Homo sapiens
VPLGLPAPG

SEQ ID NO: 137012 - protein, 9 aa, Homo sapiens
PLGLPAPGA

SEQ ID NO: 137013 - protein, 9 aa, Homo sapiens
LGLPAPGAR

SEQ ID NO: 137014 - protein, 9 aa, Homo sapiens
GLPAPGARR

SEQ ID NO: 137015 - protein, 9 aa, Homo sapiens
LPAPGARRR

SEQ ID NO: 137016 - protein, 9 aa, Homo sapiens
PAPGARRRG

SEQ ID NO: 137017 - protein, 9 aa, Homo sapiens
APGARRRGG

SEQ ID NO: 137018 - protein, 9 aa, Homo sapiens
PGARRRGGS

SEQ ID NO: 137019 - protein, 9 aa, Homo sapiens
GARRRGGSA

SEQ ID NO: 137020 - protein, 9 aa, Homo sapiens
ARRRGGSAS

SEQ ID NO: 137021 - protein, 9 aa, Homo sapiens
RRRGGSASR

SEQ ID NO: 137022 - protein, 9 aa, Homo sapiens
RRGGSASRS

SEQ ID NO: 137023 - protein, 9 aa, Homo sapiens
RGGSASRSL

SEQ ID NO: 137024 - protein, 9 aa, Homo sapiens
GGSASRSLP

SEQ ID NO: 137025 - protein, 9 aa, Homo sapiens
GSASRSLPL

SEQ ID NO: 137026 - protein, 9 aa, Homo sapiens
SASRSLPLP

SEQ ID NO: 137027 - protein, 9 aa, Homo sapiens
ASRSLPLPK

SEQ ID NO: 137028 - protein, 9 aa, Homo sapiens
SRSLPLPKR

SEQ ID NO: 137029 - protein, 9 aa, Homo sapiens
RSLPLPKRP

SEQ ID NO: 137030 - protein, 9 aa, Homo sapiens
SLPLPKRPR

SEQ ID NO: 137031 - protein, 9 aa, Homo sapiens
LPLPKRPRR

SEQ ID NO: 137032 - protein, 9 aa, Homo sapiens
PLPKRPRRG

SEQ ID NO: 137033 - protein, 9 aa, Homo sapiens
LPKRPRRGA

SEQ ID NO: 137034 - protein, 9 aa, Homo sapiens
PKRPRRGAA

SEQ ID NO: 137035 - protein, 9 aa, Homo sapiens
KRPRRGAAP

SEQ ID NO: 137036 - protein, 9 aa, Homo sapiens
RPRRGAAPE

SEQ ID NO: 137037 - protein, 9 aa, Homo sapiens
PRRGAAPEP

SEQ ID NO: 137038 - protein, 9 aa, Homo sapiens
RRGAAPEPE

SEQ ID NO: 137039 - protein, 9 aa, Homo sapiens
RGAAPEPER

SEQ ID NO: 137040 - protein, 9 aa, Homo sapiens
GAAPEPERT

SEQ ID NO: 137041 - protein, 9 aa, Homo sapiens
AAPEPERTP

SEQ ID NO: 137042 - protein, 9 aa, Homo sapiens
APEPERTPV

SEQ ID NO: 137043 - protein, 9 aa, Homo sapiens
PEPERTPVG

SEQ ID NO: 137044 - protein, 9 aa, Homo sapiens
EPERTPVGQ

SEQ ID NO: 137045 - protein, 9 aa, Homo sapiens
PERTPVGQG

SEQ ID NO: 137046 - protein, 9 aa, Homo sapiens
ERTPVGQGS

SEQ ID NO: 137047 - protein, 9 aa, Homo sapiens
RTPVGQGSW

SEQ ID NO: 137048 - protein, 9 aa, Homo sapiens
TPVGQGSWA

SEQ ID NO: 137049 - protein, 9 aa, Homo sapiens
PVGQGSWAH

SEQ ID NO: 137050 - protein, 9 aa, Homo sapiens
VGQGSWAHP

SEQ ID NO: 137051 - protein, 9 aa, Homo sapiens
GQGSWAHPG

SEQ ID NO: 137052 - protein, 9 aa, Homo sapiens
QGSWAHPGR

SEQ ID NO: 137053 - protein, 9 aa, Homo sapiens
GSWAHPGRT

SEQ ID NO: 137054 - protein, 9 aa, Homo sapiens
SWAHPGRTR

SEQ ID NO: 137055 - protein, 9 aa, Homo sapiens
WAHPGRTRG

SEQ ID NO: 137056 - protein, 9 aa, Homo sapiens
AHPGRTRGP

SEQ ID NO: 137057 - protein, 9 aa, Homo sapiens
HPGRTRGPS

SEQ ID NO: 137058 - protein, 9 aa, Homo sapiens
PGRTRGPSD

SEQ ID NO: 137059 - protein, 9 aa, Homo sapiens
GRTRGPSDR

SEQ ID NO: 137060 - protein, 9 aa, Homo sapiens
RTRGPSDRG

SEQ ID NO: 137061 - protein, 9 aa, Homo sapiens
TRGPSDRGF

SEQ ID NO: 137062 - protein, 9 aa, Homo sapiens
RGPSDRGFC

SEQ ID NO: 137063 - protein, 9 aa, Homo sapiens
GPSDRGFCV

SEQ ID NO: 137064 - protein, 9 aa, Homo sapiens
PSDRGFCVV

SEQ ID NO: 137065 - protein, 9 aa, Homo sapiens
SDRGFCVVS

SEQ ID NO: 137066 - protein, 9 aa, Homo sapiens
DRGFCVVSP

SEQ ID NO: 137067 - protein, 9 aa, Homo sapiens
RGFCVVSPA

SEQ ID NO: 137068 - protein, 9 aa, Homo sapiens
GFCVVSPAR

SEQ ID NO: 137069 - protein, 9 aa, Homo sapiens
FCVVSPARP

SEQ ID NO: 137070 - protein, 9 aa, Homo sapiens
CVVSPARPA

SEQ ID NO: 137071 - protein, 9 aa, Homo sapiens
VVSPARPAE

SEQ ID NO: 137072 - protein, 9 aa, Homo sapiens
VSPARPAEE

SEQ ID NO: 137073 - protein, 9 aa, Homo sapiens
SPARPAEEA

SEQ ID NO: 137074 - protein, 9 aa, Homo sapiens
PARPAEEAT

SEQ ID NO: 137075 - protein, 9 aa, Homo sapiens
ARPAEEATS

SEQ ID NO: 137076 - protein, 9 aa, Homo sapiens
RPAEEATSL

SEQ ID NO: 137077 - protein, 9 aa, Homo sapiens
PAEEATSLE

SEQ ID NO: 137078 - protein, 9 aa, Homo sapiens
AEEATSLEG

SEQ ID NO: 137079 - protein, 9 aa, Homo sapiens
EEATSLEGA

SEQ ID NO: 137080 - protein, 9 aa, Homo sapiens
EATSLEGAL

SEQ ID NO: 137081 - protein, 9 aa, Homo sapiens
ATSLEGALS

SEQ ID NO: 137082 - protein, 9 aa, Homo sapiens
TSLEGALSG

SEQ ID NO: 137083 - protein, 9 aa, Homo sapiens
SLEGALSGT

SEQ ID NO: 137084 - protein, 9 aa, Homo sapiens
LEGALSGTR

SEQ ID NO: 137085 - protein, 9 aa, Homo sapiens
EGALSGTRH

SEQ ID NO: 137086 - protein, 9 aa, Homo sapiens
GALSGTRHS

SEQ ID NO: 137087 - protein, 9 aa, Homo sapiens
ALSGTRHSH

SEQ ID NO: 137088 - protein, 9 aa, Homo sapiens
LSGTRHSHP

SEQ ID NO: 137089 - protein, 9 aa, Homo sapiens
SGTRHSHPS

SEQ ID NO: 137090 - protein, 9 aa, Homo sapiens
GTRHSHPSV

SEQ ID NO: 137091 - protein, 9 aa, Homo sapiens
TRHSHPSVG

SEQ ID NO: 137092 - protein, 9 aa, Homo sapiens
RHSHPSVGR

SEQ ID NO: 137093 - protein, 9 aa, Homo sapiens
HSHPSVGRQ

SEQ ID NO: 137094 - protein, 9 aa, Homo sapiens
SHPSVGRQH

SEQ ID NO: 137095 - protein, 9 aa, Homo sapiens
HPSVGRQHH

SEQ ID NO: 137096 - protein, 9 aa, Homo sapiens
PSVGRQHHA

SEQ ID NO: 137097 - protein, 9 aa, Homo sapiens
SVGRQHHAG

SEQ ID NO: 137098 - protein, 9 aa, Homo sapiens
VGRQHHAGP

SEQ ID NO: 137099 - protein, 9 aa, Homo sapiens
GRQHHAGPP

SEQ ID NO: 137100 - protein, 9 aa, Homo sapiens
RQHHAGPPS

SEQ ID NO: 137101 - protein, 9 aa, Homo sapiens
QHHAGPPST

SEQ ID NO: 137102 - protein, 9 aa, Homo sapiens
HHAGPPSTS

SEQ ID NO: 137103 - protein, 9 aa, Homo sapiens
HAGPPSTSR

SEQ ID NO: 137104 - protein, 9 aa, Homo sapiens
AGPPSTSRP

SEQ ID NO: 137105 - protein, 9 aa, Homo sapiens
GPPSTSRPP

SEQ ID NO: 137106 - protein, 9 aa, Homo sapiens
PPSTSRPPR

SEQ ID NO: 137107 - protein, 9 aa, Homo sapiens
PSTSRPPRP

SEQ ID NO: 137108 - protein, 9 aa, Homo sapiens
STSRPPRPW

SEQ ID NO: 137109 - protein, 9 aa, Homo sapiens
TSRPPRPWD

SEQ ID NO: 137110 - protein, 9 aa, Homo sapiens
SRPPRPWDT

SEQ ID NO: 137111 - protein, 9 aa, Homo sapiens
RPPRPWDTP

SEQ ID NO: 137112 - protein, 9 aa, Homo sapiens
PPRPWDTPC

SEQ ID NO: 137113 - protein, 9 aa, Homo sapiens
PRPWDTPCP

SEQ ID NO: 137114 - protein, 9 aa, Homo sapiens
RPWDTPCPP

SEQ ID NO: 137115 - protein, 9 aa, Homo sapiens
PWDTPCPPV

SEQ ID NO: 137116 - protein, 9 aa, Homo sapiens
WDTPCPPVY

SEQ ID NO: 137117 - protein, 9 aa, Homo sapiens
DTPCPPVYA

SEQ ID NO: 137118 - protein, 9 aa, Homo sapiens
TPCPPVYAE

SEQ ID NO: 137119 - protein, 9 aa, Homo sapiens
PCPPVYAET

SEQ ID NO: 137120 - protein, 9 aa, Homo sapiens
CPPVYAETK

SEQ ID NO: 137121 - protein, 9 aa, Homo sapiens
PPVYAETKH

SEQ ID NO: 137122 - protein, 9 aa, Homo sapiens
PVYAETKHF

SEQ ID NO: 137123 - protein, 9 aa, Homo sapiens
VYAETKHFL

SEQ ID NO: 137124 - protein, 9 aa, Homo sapiens
YAETKHFLY

SEQ ID NO: 137125 - protein, 9 aa, Homo sapiens
AETKHFLYS

SEQ ID NO: 137126 - protein, 9 aa, Homo sapiens
ETKHFLYSS

SEQ ID NO: 137127 - protein, 9 aa, Homo sapiens
TKHFLYSSG

SEQ ID NO: 137128 - protein, 9 aa, Homo sapiens
KHFLYSSGD

SEQ ID NO: 137129 - protein, 9 aa, Homo sapiens
HFLYSSGDK

SEQ ID NO: 137130 - protein, 9 aa, Homo sapiens
FLYSSGDKE

SEQ ID NO: 137131 - protein, 9 aa, Homo sapiens
LYSSGDKEQ

SEQ ID NO: 137132 - protein, 9 aa, Homo sapiens
YSSGDKEQL

SEQ ID NO: 137133 - protein, 9 aa, Homo sapiens
SSGDKEQLR

SEQ ID NO: 137134 - protein, 9 aa, Homo sapiens
SGDKEQLRP

SEQ ID NO: 137135 - protein, 9 aa, Homo sapiens
GDKEQLRPS

SEQ ID NO: 137136 - protein, 9 aa, Homo sapiens
DKEQLRPSF

SEQ ID NO: 137137 - protein, 9 aa, Homo sapiens
KEQLRPSFL

SEQ ID NO: 137138 - protein, 9 aa, Homo sapiens
EQLRPSFLL

SEQ ID NO: 137139 - protein, 9 aa, Homo sapiens
QLRPSFLLS

SEQ ID NO: 137140 - protein, 9 aa, Homo sapiens
LRPSFLLSS

SEQ ID NO: 137141 - protein, 9 aa, Homo sapiens
RPSFLLSSL

SEQ ID NO: 137142 - protein, 9 aa, Homo sapiens
PSFLLSSLR

SEQ ID NO: 137143 - protein, 9 aa, Homo sapiens
SFLLSSLRP

SEQ ID NO: 137144 - protein, 9 aa, Homo sapiens
FLLSSLRPS

SEQ ID NO: 137145 - protein, 9 aa, Homo sapiens
LLSSLRPSL

SEQ ID NO: 137146 - protein, 9 aa, Homo sapiens
LSSLRPSLT

SEQ ID NO: 137147 - protein, 9 aa, Homo sapiens
SSLRPSLTG

SEQ ID NO: 137148 - protein, 9 aa, Homo sapiens
SLRPSLTGA

SEQ ID NO: 137149 - protein, 9 aa, Homo sapiens
LRPSLTGAR

SEQ ID NO: 137150 - protein, 9 aa, Homo sapiens
RPSLTGARR

SEQ ID NO: 137151 - protein, 9 aa, Homo sapiens
PSLTGARRL

SEQ ID NO: 137152 - protein, 9 aa, Homo sapiens
SLTGARRLV

SEQ ID NO: 137153 - protein, 9 aa, Homo sapiens
LTGARRLVE

SEQ ID NO: 137154 - protein, 9 aa, Homo sapiens
TGARRLVET

SEQ ID NO: 137155 - protein, 9 aa, Homo sapiens
GARRLVETI

SEQ ID NO: 137156 - protein, 9 aa, Homo sapiens
ARRLVETIF

SEQ ID NO: 137157 - protein, 9 aa, Homo sapiens
RRLVETIFL

SEQ ID NO: 137158 - protein, 9 aa, Homo sapiens
RLVETIFLG

SEQ ID NO: 137159 - protein, 9 aa, Homo sapiens
LVETIFLGS

SEQ ID NO: 137160 - protein, 9 aa, Homo sapiens
VETIFLGSR

SEQ ID NO: 137161 - protein, 9 aa, Homo sapiens
ETIFLGSRP

SEQ ID NO: 137162 - protein, 9 aa, Homo sapiens
TIFLGSRPW

SEQ ID NO: 137163 - protein, 9 aa, Homo sapiens
IFLGSRPWM

SEQ ID NO: 137164 - protein, 9 aa, Homo sapiens
FLGSRPWMP

SEQ ID NO: 137165 - protein, 9 aa, Homo sapiens
LGSRPWMPG

SEQ ID NO: 137166 - protein, 9 aa, Homo sapiens
GSRPWMPGT

SEQ ID NO: 137167 - protein, 9 aa, Homo sapiens
SRPWMPGTP

SEQ ID NO: 137168 - protein, 9 aa, Homo sapiens
RPWMPGTPR

SEQ ID NO: 137169 - protein, 9 aa, Homo sapiens
PWMPGTPRR

SEQ ID NO: 137170 - protein, 9 aa, Homo sapiens
WMPGTPRRL

SEQ ID NO: 137171 - protein, 9 aa, Homo sapiens
MPGTPRRLP

SEQ ID NO: 137172 - protein, 9 aa, Homo sapiens
PGTPRRLPR

SEQ ID NO: 137173 - protein, 9 aa, Homo sapiens
GTPRRLPRL

SEQ ID NO: 137174 - protein, 9 aa, Homo sapiens
TPRRLPRLP

SEQ ID NO: 137175 - protein, 9 aa, Homo sapiens
PRRLPRLPQ

SEQ ID NO: 137176 - protein, 9 aa, Homo sapiens
RRLPRLPQR

SEQ ID NO: 137177 - protein, 9 aa, Homo sapiens
RLPRLPQRY

SEQ ID NO: 137178 - protein, 9 aa, Homo sapiens
LPRLPQRYW

SEQ ID NO: 137179 - protein, 9 aa, Homo sapiens
PRLPQRYWQ

SEQ ID NO: 137180 - protein, 9 aa, Homo sapiens
RLPQRYWQM

SEQ ID NO: 137181 - protein, 9 aa, Homo sapiens
LPQRYWQMR

SEQ ID NO: 137182 - protein, 9 aa, Homo sapiens
PQRYWQMRP

SEQ ID NO: 137183 - protein, 9 aa, Homo sapiens
QRYWQMRPL

SEQ ID NO: 137184 - protein, 9 aa, Homo sapiens
RYWQMRPLF

SEQ ID NO: 137185 - protein, 9 aa, Homo sapiens
YWQMRPLFL

SEQ ID NO: 137186 - protein, 9 aa, Homo sapiens
WQMRPLFLE

SEQ ID NO: 137187 - protein, 9 aa, Homo sapiens
QMRPLFLEL

SEQ ID NO: 137188 - protein, 9 aa, Homo sapiens
MRPLFLELL

SEQ ID NO: 137189 - protein, 9 aa, Homo sapiens
RPLFLELLG

SEQ ID NO: 137190 - protein, 9 aa, Homo sapiens
PLFLELLGN

SEQ ID NO: 137191 - protein, 9 aa, Homo sapiens
LFLELLGNH

SEQ ID NO: 137192 - protein, 9 aa, Homo sapiens
FLELLGNHA

SEQ ID NO: 137193 - protein, 9 aa, Homo sapiens
LELLGNHAQ

SEQ ID NO: 137194 - protein, 9 aa, Homo sapiens
ELLGNHAQC

SEQ ID NO: 137195 - protein, 9 aa, Homo sapiens
LLGNHAQCP

SEQ ID NO: 137196 - protein, 9 aa, Homo sapiens
LGNHAQCPY

SEQ ID NO: 137197 - protein, 9 aa, Homo sapiens
GNHAQCPYG

SEQ ID NO: 137198 - protein, 9 aa, Homo sapiens
NHAQCPYGV

SEQ ID NO: 137199 - protein, 9 aa, Homo sapiens
HAQCPYGVL

SEQ ID NO: 137200 - protein, 9 aa, Homo sapiens
AQCPYGVLL

SEQ ID NO: 137201 - protein, 9 aa, Homo sapiens
QCPYGVLLK

SEQ ID NO: 137202 - protein, 9 aa, Homo sapiens
CPYGVLLKT

SEQ ID NO: 137203 - protein, 9 aa, Homo sapiens
PYGVLLKTH

SEQ ID NO: 137204 - protein, 9 aa, Homo sapiens
YGVLLKTHC

SEQ ID NO: 137205 - protein, 9 aa, Homo sapiens
GVLLKTHCP

SEQ ID NO: 137206 - protein, 9 aa, Homo sapiens
VLLKTHCPL

SEQ ID NO: 137207 - protein, 9 aa, Homo sapiens
LLKTHCPLR

SEQ ID NO: 137208 - protein, 9 aa, Homo sapiens
LKTHCPLRA

SEQ ID NO: 137209 - protein, 9 aa, Homo sapiens
KTHCPLRAA

SEQ ID NO: 137210 - protein, 9 aa, Homo sapiens
THCPLRAAV

SEQ ID NO: 137211 - protein, 9 aa, Homo sapiens
HCPLRAAVT

SEQ ID NO: 137212 - protein, 9 aa, Homo sapiens
CPLRAAVTP

SEQ ID NO: 137213 - protein, 9 aa, Homo sapiens
PLRAAVTPA

SEQ ID NO: 137214 - protein, 9 aa, Homo sapiens
LRAAVTPAA

SEQ ID NO: 137215 - protein, 9 aa, Homo sapiens
RAAVTPAAG

SEQ ID NO: 137216 - protein, 9 aa, Homo sapiens
AAVTPAAGV

SEQ ID NO: 137217 - protein, 9 aa, Homo sapiens
AVTPAAGVC

SEQ ID NO: 137218 - protein, 9 aa, Homo sapiens
VTPAAGVCA

SEQ ID NO: 137219 - protein, 9 aa, Homo sapiens
TPAAGVCAR

SEQ ID NO: 137220 - protein, 9 aa, Homo sapiens
PAAGVCARE

SEQ ID NO: 137221 - protein, 9 aa, Homo sapiens
AAGVCAREK

SEQ ID NO: 137222 - protein, 9 aa, Homo sapiens
AGVCAREKP

SEQ ID NO: 137223 - protein, 9 aa, Homo sapiens
GVCAREKPQ

SEQ ID NO: 137224 - protein, 9 aa, Homo sapiens
VCAREKPQG

SEQ ID NO: 137225 - protein, 9 aa, Homo sapiens
CAREKPQGS

SEQ ID NO: 137226 - protein, 9 aa, Homo sapiens
AREKPQGSV

SEQ ID NO: 137227 - protein, 9 aa, Homo sapiens
REKPQGSVA

SEQ ID NO: 137228 - protein, 9 aa, Homo sapiens
EKPQGSVAA

SEQ ID NO: 137229 - protein, 9 aa, Homo sapiens
KPQGSVAAP

SEQ ID NO: 137230 - protein, 9 aa, Homo sapiens
PQGSVAAPE

SEQ ID NO: 137231 - protein, 9 aa, Homo sapiens
QGSVAAPEE

SEQ ID NO: 137232 - protein, 9 aa, Homo sapiens
GSVAAPEEE

SEQ ID NO: 137233 - protein, 9 aa, Homo sapiens
SVAAPEEED

SEQ ID NO: 137234 - protein, 9 aa, Homo sapiens
VAAPEEEDT

SEQ ID NO: 137235 - protein, 9 aa, Homo sapiens
AAPEEEDTD

SEQ ID NO: 137236 - protein, 9 aa, Homo sapiens
APEEEDTDP

SEQ ID NO: 137237 - protein, 9 aa, Homo sapiens
PEEEDTDPR

SEQ ID NO: 137238 - protein, 9 aa, Homo sapiens
EEEDTDPRR

SEQ ID NO: 137239 - protein, 9 aa, Homo sapiens
EEDTDPRRL

SEQ ID NO: 137240 - protein, 9 aa, Homo sapiens
EDTDPRRLV

SEQ ID NO: 137241 - protein, 9 aa, Homo sapiens
DTDPRRLVQ

SEQ ID NO: 137242 - protein, 9 aa, Homo sapiens
TDPRRLVQL

SEQ ID NO: 137243 - protein, 9 aa, Homo sapiens
DPRRLVQLL

SEQ ID NO: 137244 - protein, 9 aa, Homo sapiens
PRRLVQLLR

SEQ ID NO: 137245 - protein, 9 aa, Homo sapiens
RRLVQLLRQ

SEQ ID NO: 137246 - protein, 9 aa, Homo sapiens
RLVQLLRQH

SEQ ID NO: 137247 - protein, 9 aa, Homo sapiens
LVQLLRQHS

SEQ ID NO: 137248 - protein, 9 aa, Homo sapiens
VQLLRQHSS

SEQ ID NO: 137249 - protein, 9 aa, Homo sapiens
QLLRQHSSP

SEQ ID NO: 137250 - protein, 9 aa, Homo sapiens
LLRQHSSPW

SEQ ID NO: 137251 - protein, 9 aa, Homo sapiens
LRQHSSPWQ

SEQ ID NO: 137252 - protein, 9 aa, Homo sapiens
RQHSSPWQV

SEQ ID NO: 137253 - protein, 9 aa, Homo sapiens
QHSSPWQVY

SEQ ID NO: 137254 - protein, 9 aa, Homo sapiens
HSSPWQVYG

SEQ ID NO: 137255 - protein, 9 aa, Homo sapiens
SSPWQVYGF

SEQ ID NO: 137256 - protein, 9 aa, Homo sapiens
SPWQVYGFV

SEQ ID NO: 137257 - protein, 9 aa, Homo sapiens
PWQVYGFVR

SEQ ID NO: 137258 - protein, 9 aa, Homo sapiens
WQVYGFVRA

SEQ ID NO: 137259 - protein, 9 aa, Homo sapiens
QVYGFVRAC

SEQ ID NO: 137260 - protein, 9 aa, Homo sapiens
VYGFVRACL

SEQ ID NO: 137261 - protein, 9 aa, Homo sapiens
YGFVRACLR

SEQ ID NO: 137262 - protein, 9 aa, Homo sapiens
GFVRACLRR

SEQ ID NO: 137263 - protein, 9 aa, Homo sapiens
FVRACLRRL

SEQ ID NO: 137264 - protein, 9 aa, Homo sapiens
VRACLRRLV

SEQ ID NO: 137265 - protein, 9 aa, Homo sapiens
RACLRRLVP

SEQ ID NO: 137266 - protein, 9 aa, Homo sapiens
ACLRRLVPP

SEQ ID NO: 137267 - protein, 9 aa, Homo sapiens
CLRRLVPPG

SEQ ID NO: 137268 - protein, 9 aa, Homo sapiens
LRRLVPPGL

SEQ ID NO: 137269 - protein, 9 aa, Homo sapiens
RRLVPPGLW

SEQ ID NO: 137270 - protein, 9 aa, Homo sapiens
RLVPPGLWG

SEQ ID NO: 137271 - protein, 9 aa, Homo sapiens
LVPPGLWGS

SEQ ID NO: 137272 - protein, 9 aa, Homo sapiens
VPPGLWGSR

SEQ ID NO: 137273 - protein, 9 aa, Homo sapiens
PPGLWGSRH

SEQ ID NO: 137274 - protein, 9 aa, Homo sapiens
PGLWGSRHN

SEQ ID NO: 137275 - protein, 9 aa, Homo sapiens
GLWGSRHNE

SEQ ID NO: 137276 - protein, 9 aa, Homo sapiens
LWGSRHNER

SEQ ID NO: 137277 - protein, 9 aa, Homo sapiens
WGSRHNERR

SEQ ID NO: 137278 - protein, 9 aa, Homo sapiens
GSRHNERRF

SEQ ID NO: 137279 - protein, 9 aa, Homo sapiens
SRHNERRFL

SEQ ID NO: 137280 - protein, 9 aa, Homo sapiens
RHNERRFLR

SEQ ID NO: 137281 - protein, 9 aa, Homo sapiens
HNERRFLRN

SEQ ID NO: 137282 - protein, 9 aa, Homo sapiens
NERRFLRNT

SEQ ID NO: 137283 - protein, 9 aa, Homo sapiens
ERRFLRNTK

SEQ ID NO: 137284 - protein, 9 aa, Homo sapiens
RRFLRNTKK

SEQ ID NO: 137285 - protein, 9 aa, Homo sapiens
RFLRNTKKF

SEQ ID NO: 137286 - protein, 9 aa, Homo sapiens
FLRNTKKFI

SEQ ID NO: 137287 - protein, 9 aa, Homo sapiens
LRNTKKFIS

SEQ ID NO: 137288 - protein, 9 aa, Homo sapiens
RNTKKFISL

SEQ ID NO: 137289 - protein, 9 aa, Homo sapiens
NTKKFISLG

SEQ ID NO: 137290 - protein, 9 aa, Homo sapiens
TKKFISLGK

SEQ ID NO: 137291 - protein, 9 aa, Homo sapiens
KKFISLGKH

SEQ ID NO: 137292 - protein, 9 aa, Homo sapiens
KFISLGKHA

SEQ ID NO: 137293 - protein, 9 aa, Homo sapiens
FISLGKHAK

SEQ ID NO: 137294 - protein, 9 aa, Homo sapiens
ISLGKHAKL

SEQ ID NO: 137295 - protein, 9 aa, Homo sapiens
SLGKHAKLS

SEQ ID NO: 137296 - protein, 9 aa, Homo sapiens
LGKHAKLSL

SEQ ID NO: 137297 - protein, 9 aa, Homo sapiens
GKHAKLSLQ

SEQ ID NO: 137298 - protein, 9 aa, Homo sapiens
KHAKLSLQE

SEQ ID NO: 137299 - protein, 9 aa, Homo sapiens
HAKLSLQEL

SEQ ID NO: 137300 - protein, 9 aa, Homo sapiens
AKLSLQELT

SEQ ID NO: 137301 - protein, 9 aa, Homo sapiens
KLSLQELTW

SEQ ID NO: 137302 - protein, 9 aa, Homo sapiens
LSLQELTWK

SEQ ID NO: 137303 - protein, 9 aa, Homo sapiens
SLQELTWKM

SEQ ID NO: 137304 - protein, 9 aa, Homo sapiens
LQELTWKMS

SEQ ID NO: 137305 - protein, 9 aa, Homo sapiens
QELTWKMSV

SEQ ID NO: 137306 - protein, 9 aa, Homo sapiens
ELTWKMSVR

SEQ ID NO: 137307 - protein, 9 aa, Homo sapiens
LTWKMSVRD

SEQ ID NO: 137308 - protein, 9 aa, Homo sapiens
TWKMSVRDC

SEQ ID NO: 137309 - protein, 9 aa, Homo sapiens
WKMSVRDCA

SEQ ID NO: 137310 - protein, 9 aa, Homo sapiens
KMSVRDCAW

SEQ ID NO: 137311 - protein, 9 aa, Homo sapiens
MSVRDCAWL

SEQ ID NO: 137312 - protein, 9 aa, Homo sapiens
SVRDCAWLR

SEQ ID NO: 137313 - protein, 9 aa, Homo sapiens
VRDCAWLRR

SEQ ID NO: 137314 - protein, 9 aa, Homo sapiens
RDCAWLRRS

SEQ ID NO: 137315 - protein, 9 aa, Homo sapiens
DCAWLRRSP

SEQ ID NO: 137316 - protein, 9 aa, Homo sapiens
CAWLRRSPG

SEQ ID NO: 137317 - protein, 9 aa, Homo sapiens
AWLRRSPGV

SEQ ID NO: 137318 - protein, 9 aa, Homo sapiens
WLRRSPGVG

SEQ ID NO: 137319 - protein, 9 aa, Homo sapiens
LRRSPGVGC

SEQ ID NO: 137320 - protein, 9 aa, Homo sapiens
RRSPGVGCV

SEQ ID NO: 137321 - protein, 9 aa, Homo sapiens
RSPGVGCVP

SEQ ID NO: 137322 - protein, 9 aa, Homo sapiens
SPGVGCVPA

SEQ ID NO: 137323 - protein, 9 aa, Homo sapiens
PGVGCVPAA

SEQ ID NO: 137324 - protein, 9 aa, Homo sapiens
GVGCVPAAE

SEQ ID NO: 137325 - protein, 9 aa, Homo sapiens
VGCVPAAEH

SEQ ID NO: 137326 - protein, 9 aa, Homo sapiens
GCVPAAEHR

SEQ ID NO: 137327 - protein, 9 aa, Homo sapiens
CVPAAEHRL

SEQ ID NO: 137328 - protein, 9 aa, Homo sapiens
VPAAEHRLR

SEQ ID NO: 137329 - protein, 9 aa, Homo sapiens
PAAEHRLRE

SEQ ID NO: 137330 - protein, 9 aa, Homo sapiens
AAEHRLREE

SEQ ID NO: 137331 - protein, 9 aa, Homo sapiens
AEHRLREEI

SEQ ID NO: 137332 - protein, 9 aa, Homo sapiens
EHRLREEIL

SEQ ID NO: 137333 - protein, 9 aa, Homo sapiens
HRLREEILA

SEQ ID NO: 137334 - protein, 9 aa, Homo sapiens
RLREEILAK

SEQ ID NO: 137335 - protein, 9 aa, Homo sapiens
LREEILAKF

SEQ ID NO: 137336 - protein, 9 aa, Homo sapiens
REEILAKFL

SEQ ID NO: 137337 - protein, 9 aa, Homo sapiens
EEILAKFLH

SEQ ID NO: 137338 - protein, 9 aa, Homo sapiens
EILAKFLHW

SEQ ID NO: 137339 - protein, 9 aa, Homo sapiens
ILAKFLHWL

SEQ ID NO: 137340 - protein, 9 aa, Homo sapiens
LAKFLHWLM

SEQ ID NO: 137341 - protein, 9 aa, Homo sapiens
AKFLHWLMS

SEQ ID NO: 137342 - protein, 9 aa, Homo sapiens
KFLHWLMSV

SEQ ID NO: 137343 - protein, 9 aa, Homo sapiens
FLHWLMSVY

SEQ ID NO: 137344 - protein, 9 aa, Homo sapiens
LHWLMSVYV

SEQ ID NO: 137345 - protein, 9 aa, Homo sapiens
HWLMSVYVV

SEQ ID NO: 137346 - protein, 9 aa, Homo sapiens
WLMSVYVVE

SEQ ID NO: 137347 - protein, 9 aa, Homo sapiens
LMSVYVVEL

SEQ ID NO: 137348 - protein, 9 aa, Homo sapiens
MSVYVVELL

SEQ ID NO: 137349 - protein, 9 aa, Homo sapiens
SVYVVELLR

SEQ ID NO: 137350 - protein, 9 aa, Homo sapiens
VYVVELLRS

SEQ ID NO: 137351 - protein, 9 aa, Homo sapiens
YVVELLRSF

SEQ ID NO: 137352 - protein, 9 aa, Homo sapiens
VVELLRSFF

SEQ ID NO: 137353 - protein, 9 aa, Homo sapiens
VELLRSFFY

SEQ ID NO: 137354 - protein, 9 aa, Homo sapiens
ELLRSFFYV

SEQ ID NO: 137355 - protein, 9 aa, Homo sapiens
LLRSFFYVT

SEQ ID NO: 137356 - protein, 9 aa, Homo sapiens
LRSFFYVTE

SEQ ID NO: 137357 - protein, 9 aa, Homo sapiens
RSFFYVTET

SEQ ID NO: 137358 - protein, 9 aa, Homo sapiens
SFFYVTETT

SEQ ID NO: 137359 - protein, 9 aa, Homo sapiens
FFYVTETTF

SEQ ID NO: 137360 - protein, 9 aa, Homo sapiens
FYVTETTFQ

SEQ ID NO: 137361 - protein, 9 aa, Homo sapiens
YVTETTFQK

SEQ ID NO: 137362 - protein, 9 aa, Homo sapiens
VTETTFQKN

SEQ ID NO: 137363 - protein, 9 aa, Homo sapiens
TETTFQKNR

SEQ ID NO: 137364 - protein, 9 aa, Homo sapiens
ETTFQKNRL

SEQ ID NO: 137365 - protein, 9 aa, Homo sapiens
TTFQKNRLF

SEQ ID NO: 137366 - protein, 9 aa, Homo sapiens
TFQKNRLFF

SEQ ID NO: 137367 - protein, 9 aa, Homo sapiens
FQKNRLFFY

SEQ ID NO: 137368 - protein, 9 aa, Homo sapiens
QKNRLFFYR

SEQ ID NO: 137369 - protein, 9 aa, Homo sapiens
KNRLFFYRK

SEQ ID NO: 137370 - protein, 9 aa, Homo sapiens
NRLFFYRKS

SEQ ID NO: 137371 - protein, 9 aa, Homo sapiens
RLFFYRKSV

SEQ ID NO: 137372 - protein, 9 aa, Homo sapiens
LFFYRKSVW

SEQ ID NO: 137373 - protein, 9 aa, Homo sapiens
FFYRKSVWS

SEQ ID NO: 137374 - protein, 9 aa, Homo sapiens
FYRKSVWSK

SEQ ID NO: 137375 - protein, 9 aa, Homo sapiens
YRKSVWSKL

SEQ ID NO: 137376 - protein, 9 aa, Homo sapiens
RKSVWSKLQ

SEQ ID NO: 137377 - protein, 9 aa, Homo sapiens
KSVWSKLQS

SEQ ID NO: 137378 - protein, 9 aa, Homo sapiens
SVWSKLQSI

SEQ ID NO: 137379 - protein, 9 aa, Homo sapiens
VWSKLQSIG

SEQ ID NO: 137380 - protein, 9 aa, Homo sapiens
WSKLQSIGI

SEQ ID NO: 137381 - protein, 9 aa, Homo sapiens
SKLQSIGIR

SEQ ID NO: 137382 - protein, 9 aa, Homo sapiens
KLQSIGIRQ

SEQ ID NO: 137383 - protein, 9 aa, Homo sapiens
LQSIGIRQH

SEQ ID NO: 137384 - protein, 9 aa, Homo sapiens
QSIGIRQHL

SEQ ID NO: 137385 - protein, 9 aa, Homo sapiens
SIGIRQHLK

SEQ ID NO: 137386 - protein, 9 aa, Homo sapiens
IGIRQHLKR

SEQ ID NO: 137387 - protein, 9 aa, Homo sapiens
GIRQHLKRV

SEQ ID NO: 137388 - protein, 9 aa, Homo sapiens
IRQHLKRVQ

SEQ ID NO: 137389 - protein, 9 aa, Homo sapiens
RQHLKRVQL

SEQ ID NO: 137390 - protein, 9 aa, Homo sapiens
QHLKRVQLR

SEQ ID NO: 137391 - protein, 9 aa, Homo sapiens
HLKRVQLRE

SEQ ID NO: 137392 - protein, 9 aa, Homo sapiens
LKRVQLREL

SEQ ID NO: 137393 - protein, 9 aa, Homo sapiens
KRVQLRELS

SEQ ID NO: 137394 - protein, 9 aa, Homo sapiens
RVQLRELSE

SEQ ID NO: 137395 - protein, 9 aa, Homo sapiens
VQLRELSEA

SEQ ID NO: 137396 - protein, 9 aa, Homo sapiens
QLRELSEAE

SEQ ID NO: 137397 - protein, 9 aa, Homo sapiens
LRELSEAEV

SEQ ID NO: 137398 - protein, 9 aa, Homo sapiens
RELSEAEVR

SEQ ID NO: 137399 - protein, 9 aa, Homo sapiens
ELSEAEVRQ

SEQ ID NO: 137400 - protein, 9 aa, Homo sapiens
LSEAEVRQH

SEQ ID NO: 137401 - protein, 9 aa, Homo sapiens
SEAEVRQHR

SEQ ID NO: 137402 - protein, 9 aa, Homo sapiens
EAEVRQHRE

SEQ ID NO: 137403 - protein, 9 aa, Homo sapiens
AEVRQHREA

SEQ ID NO: 137404 - protein, 9 aa, Homo sapiens
EVRQHREAR

SEQ ID NO: 137405 - protein, 9 aa, Homo sapiens
VRQHREARP

SEQ ID NO: 137406 - protein, 9 aa, Homo sapiens
RQHREARPA

SEQ ID NO: 137407 - protein, 9 aa, Homo sapiens
QHREARPAL

SEQ ID NO: 137408 - protein, 9 aa, Homo sapiens
HREARPALL

SEQ ID NO: 137409 - protein, 9 aa, Homo sapiens
REARPALLT

SEQ ID NO: 137410 - protein, 9 aa, Homo sapiens
EARPALLTS

SEQ ID NO: 137411 - protein, 9 aa, Homo sapiens
ARPALLTSR

SEQ ID NO: 137412 - protein, 9 aa, Homo sapiens
RPALLTSRL

SEQ ID NO: 137413 - protein, 9 aa, Homo sapiens
PALLTSRLR

SEQ ID NO: 137414 - protein, 9 aa, Homo sapiens
ALLTSRLRF

SEQ ID NO: 137415 - protein, 9 aa, Homo sapiens
LLTSRLRFI

SEQ ID NO: 137416 - protein, 9 aa, Homo sapiens
LTSRLRFIP

SEQ ID NO: 137417 - protein, 9 aa, Homo sapiens
TSRLRFIPK

SEQ ID NO: 137418 - protein, 9 aa, Homo sapiens
SRLRFIPKP

SEQ ID NO: 137419 - protein, 9 aa, Homo sapiens
RLRFIPKPD

SEQ ID NO: 137420 - protein, 9 aa, Homo sapiens
LRFIPKPDG

SEQ ID NO: 137421 - protein, 9 aa, Homo sapiens
RFIPKPDGL

SEQ ID NO: 137422 - protein, 9 aa, Homo sapiens
FIPKPDGLR

SEQ ID NO: 137423 - protein, 9 aa, Homo sapiens
IPKPDGLRP

SEQ ID NO: 137424 - protein, 9 aa, Homo sapiens
PKPDGLRPI

SEQ ID NO: 137425 - protein, 9 aa, Homo sapiens
KPDGLRPIV

SEQ ID NO: 137426 - protein, 9 aa, Homo sapiens
PDGLRPIVN

SEQ ID NO: 137427 - protein, 9 aa, Homo sapiens
DGLRPIVNM

SEQ ID NO: 137428 - protein, 9 aa, Homo sapiens
GLRPIVNMD

SEQ ID NO: 137429 - protein, 9 aa, Homo sapiens
LRPIVNMDY

SEQ ID NO: 137430 - protein, 9 aa, Homo sapiens
RPIVNMDYV

SEQ ID NO: 137431 - protein, 9 aa, Homo sapiens
PIVNMDYVV

SEQ ID NO: 137432 - protein, 9 aa, Homo sapiens
IVNMDYVVG

SEQ ID NO: 137433 - protein, 9 aa, Homo sapiens
VNMDYVVGA

SEQ ID NO: 137434 - protein, 9 aa, Homo sapiens
NMDYVVGAR

SEQ ID NO: 137435 - protein, 9 aa, Homo sapiens
MDYVVGART

SEQ ID NO: 137436 - protein, 9 aa, Homo sapiens
DYVVGARTF

SEQ ID NO: 137437 - protein, 9 aa, Homo sapiens
YVVGARTFR

SEQ ID NO: 137438 - protein, 9 aa, Homo sapiens
VVGARTFRR

SEQ ID NO: 137439 - protein, 9 aa, Homo sapiens
VGARTFRRE

SEQ ID NO: 137440 - protein, 9 aa, Homo sapiens
GARTFRREK

SEQ ID NO: 137441 - protein, 9 aa, Homo sapiens
ARTFRREKR

SEQ ID NO: 137442 - protein, 9 aa, Homo sapiens
RTFRREKRA

SEQ ID NO: 137443 - protein, 9 aa, Homo sapiens
TFRREKRAE

SEQ ID NO: 137444 - protein, 9 aa, Homo sapiens
FRREKRAER

SEQ ID NO: 137445 - protein, 9 aa, Homo sapiens
RREKRAERL

SEQ ID NO: 137446 - protein, 9 aa, Homo sapiens
REKRAERLT

SEQ ID NO: 137447 - protein, 9 aa, Homo sapiens
EKRAERLTS

SEQ ID NO: 137448 - protein, 9 aa, Homo sapiens
KRAERLTSR

SEQ ID NO: 137449 - protein, 9 aa, Homo sapiens
RAERLTSRV

SEQ ID NO: 137450 - protein, 9 aa, Homo sapiens
AERLTSRVK

SEQ ID NO: 137451 - protein, 9 aa, Homo sapiens
ERLTSRVKA

SEQ ID NO: 137452 - protein, 9 aa, Homo sapiens
RLTSRVKAL

SEQ ID NO: 137453 - protein, 9 aa, Homo sapiens
LTSRVKALF

SEQ ID NO: 137454 - protein, 9 aa, Homo sapiens
TSRVKALFS

SEQ ID NO: 137455 - protein, 9 aa, Homo sapiens
SRVKALFSV

SEQ ID NO: 137456 - protein, 9 aa, Homo sapiens
RVKALFSVL

SEQ ID NO: 137457 - protein, 9 aa, Homo sapiens
VKALFSVLN

SEQ ID NO: 137458 - protein, 9 aa, Homo sapiens
KALFSVLNY

SEQ ID NO: 137459 - protein, 9 aa, Homo sapiens
ALFSVLNYE

SEQ ID NO: 137460 - protein, 9 aa, Homo sapiens
LFSVLNYER

SEQ ID NO: 137461 - protein, 9 aa, Homo sapiens
FSVLNYERA

SEQ ID NO: 137462 - protein, 9 aa, Homo sapiens
SVLNYERAR

SEQ ID NO: 137463 - protein, 9 aa, Homo sapiens
VLNYERARR

SEQ ID NO: 137464 - protein, 9 aa, Homo sapiens
LNYERARRP

SEQ ID NO: 137465 - protein, 9 aa, Homo sapiens
NYERARRPG

SEQ ID NO: 137466 - protein, 9 aa, Homo sapiens
YERARRPGL

SEQ ID NO: 137467 - protein, 9 aa, Homo sapiens
ERARRPGLL

SEQ ID NO: 137468 - protein, 9 aa, Homo sapiens
RARRPGLLG

SEQ ID NO: 137469 - protein, 9 aa, Homo sapiens
ARRPGLLGA

SEQ ID NO: 137470 - protein, 9 aa, Homo sapiens
RRPGLLGAS

SEQ ID NO: 137471 - protein, 9 aa, Homo sapiens
RPGLLGASV

SEQ ID NO: 137472 - protein, 9 aa, Homo sapiens
PGLLGASVL

SEQ ID NO: 137473 - protein, 9 aa, Homo sapiens
GLLGASVLG

SEQ ID NO: 137474 - protein, 9 aa, Homo sapiens
LLGASVLGL

SEQ ID NO: 137475 - protein, 9 aa, Homo sapiens
LGASVLGLD

SEQ ID NO: 137476 - protein, 9 aa, Homo sapiens
GASVLGLDD

SEQ ID NO: 137477 - protein, 9 aa, Homo sapiens
ASVLGLDDI

SEQ ID NO: 137478 - protein, 9 aa, Homo sapiens
SVLGLDDIH

SEQ ID NO: 137479 - protein, 9 aa, Homo sapiens
VLGLDDIHR

SEQ ID NO: 137480 - protein, 9 aa, Homo sapiens
LGLDDIHRA

SEQ ID NO: 137481 - protein, 9 aa, Homo sapiens
GLDDIHRAW

SEQ ID NO: 137482 - protein, 9 aa, Homo sapiens
LDDIHRAWR

SEQ ID NO: 137483 - protein, 9 aa, Homo sapiens
DDIHRAWRT

SEQ ID NO: 137484 - protein, 9 aa, Homo sapiens
DIHRAWRTF

SEQ ID NO: 137485 - protein, 9 aa, Homo sapiens
IHRAWRTFV

SEQ ID NO: 137486 - protein, 9 aa, Homo sapiens
HRAWRTFVL

SEQ ID NO: 137487 - protein, 9 aa, Homo sapiens
RAWRTFVLR

SEQ ID NO: 137488 - protein, 9 aa, Homo sapiens
AWRTFVLRV

SEQ ID NO: 137489 - protein, 9 aa, Homo sapiens
WRTFVLRVR

SEQ ID NO: 137490 - protein, 9 aa, Homo sapiens
RTFVLRVRA

SEQ ID NO: 137491 - protein, 9 aa, Homo sapiens
TFVLRVRAQ

SEQ ID NO: 137492 - protein, 9 aa, Homo sapiens
FVLRVRAQD

SEQ ID NO: 137493 - protein, 9 aa, Homo sapiens
VLRVRAQDP

SEQ ID NO: 137494 - protein, 9 aa, Homo sapiens
LRVRAQDPP

SEQ ID NO: 137495 - protein, 9 aa, Homo sapiens
RVRAQDPPP

SEQ ID NO: 137496 - protein, 9 aa, Homo sapiens
VRAQDPPPE

SEQ ID NO: 137497 - protein, 9 aa, Homo sapiens
RAQDPPPEL

SEQ ID NO: 137498 - protein, 9 aa, Homo sapiens
AQDPPPELY

SEQ ID NO: 137499 - protein, 9 aa, Homo sapiens
QDPPPELYF

SEQ ID NO: 137500 - protein, 9 aa, Homo sapiens
DPPPELYFV

SEQ ID NO: 137501 - protein, 9 aa, Homo sapiens
PPPELYFVK

SEQ ID NO: 137502 - protein, 9 aa, Homo sapiens
PPELYFVKV

SEQ ID NO: 137503 - protein, 9 aa, Homo sapiens
PELYFVKVD

SEQ ID NO: 137504 - protein, 9 aa, Homo sapiens
ELYFVKVDV

SEQ ID NO: 137505 - protein, 9 aa, Homo sapiens
LYFVKVDVT

SEQ ID NO: 137506 - protein, 9 aa, Homo sapiens
YFVKVDVTG

SEQ ID NO: 137507 - protein, 9 aa, Homo sapiens
FVKVDVTGA

SEQ ID NO: 137508 - protein, 9 aa, Homo sapiens
VKVDVTGAY

SEQ ID NO: 137509 - protein, 9 aa, Homo sapiens
KVDVTGAYD

SEQ ID NO: 137510 - protein, 9 aa, Homo sapiens
VDVTGAYDT

SEQ ID NO: 137511 - protein, 9 aa, Homo sapiens
DVTGAYDTI

SEQ ID NO: 137512 - protein, 9 aa, Homo sapiens
VTGAYDTIP

SEQ ID NO: 137513 - protein, 9 aa, Homo sapiens
TGAYDTIPQ

SEQ ID NO: 137514 - protein, 9 aa, Homo sapiens
GAYDTIPQD

SEQ ID NO: 137515 - protein, 9 aa, Homo sapiens
AYDTIPQDR

SEQ ID NO: 137516 - protein, 9 aa, Homo sapiens
YDTIPQDRL

SEQ ID NO: 137517 - protein, 9 aa, Homo sapiens
DTIPQDRLT

SEQ ID NO: 137518 - protein, 9 aa, Homo sapiens
TIPQDRLTE

SEQ ID NO: 137519 - protein, 9 aa, Homo sapiens
IPQDRLTEV

SEQ ID NO: 137520 - protein, 9 aa, Homo sapiens
PQDRLTEVI

SEQ ID NO: 137521 - protein, 9 aa, Homo sapiens
QDRLTEVIA

SEQ ID NO: 137522 - protein, 9 aa, Homo sapiens
DRLTEVIAS

SEQ ID NO: 137523 - protein, 9 aa, Homo sapiens
RLTEVIASI

SEQ ID NO: 137524 - protein, 9 aa, Homo sapiens
LTEVIASII

SEQ ID NO: 137525 - protein, 9 aa, Homo sapiens
TEVIASIIK

SEQ ID NO: 137526 - protein, 9 aa, Homo sapiens
EVIASIIKP

SEQ ID NO: 137527 - protein, 9 aa, Homo sapiens
VIASIIKPQ

SEQ ID NO: 137528 - protein, 9 aa, Homo sapiens
IASIIKPQN

SEQ ID NO: 137529 - protein, 9 aa, Homo sapiens
ASIIKPQNT

SEQ ID NO: 137530 - protein, 9 aa, Homo sapiens
SIIKPQNTY

SEQ ID NO: 137531 - protein, 9 aa, Homo sapiens
IIKPQNTYC

SEQ ID NO: 137532 - protein, 9 aa, Homo sapiens
IKPQNTYCV

SEQ ID NO: 137533 - protein, 9 aa, Homo sapiens
KPQNTYCVR

SEQ ID NO: 137534 - protein, 9 aa, Homo sapiens
PQNTYCVRR

SEQ ID NO: 137535 - protein, 9 aa, Homo sapiens
QNTYCVRRY

SEQ ID NO: 137536 - protein, 9 aa, Homo sapiens
NTYCVRRYA

SEQ ID NO: 137537 - protein, 9 aa, Homo sapiens
TYCVRRYAV

SEQ ID NO: 137538 - protein, 9 aa, Homo sapiens
YCVRRYAVV

SEQ ID NO: 137539 - protein, 9 aa, Homo sapiens
CVRRYAVVQ

SEQ ID NO: 137540 - protein, 9 aa, Homo sapiens
VRRYAVVQK

SEQ ID NO: 137541 - protein, 9 aa, Homo sapiens
RRYAVVQKA

SEQ ID NO: 137542 - protein, 9 aa, Homo sapiens
RYAVVQKAA

SEQ ID NO: 137543 - protein, 9 aa, Homo sapiens
YAVVQKAAH

SEQ ID NO: 137544 - protein, 9 aa, Homo sapiens
AVVQKAAHG

SEQ ID NO: 137545 - protein, 9 aa, Homo sapiens
VVQKAAHGH

SEQ ID NO: 137546 - protein, 9 aa, Homo sapiens
VQKAAHGHV

SEQ ID NO: 137547 - protein, 9 aa, Homo sapiens
QKAAHGHVR

SEQ ID NO: 137548 - protein, 9 aa, Homo sapiens
KAAHGHVRK

SEQ ID NO: 137549 - protein, 9 aa, Homo sapiens
AAHGHVRKA

SEQ ID NO: 137550 - protein, 9 aa, Homo sapiens
AHGHVRKAF

SEQ ID NO: 137551 - protein, 9 aa, Homo sapiens
HGHVRKAFK

SEQ ID NO: 137552 - protein, 9 aa, Homo sapiens
GHVRKAFKS

SEQ ID NO: 137553 - protein, 9 aa, Homo sapiens
HVRKAFKSH

SEQ ID NO: 137554 - protein, 9 aa, Homo sapiens
VRKAFKSHV

SEQ ID NO: 137555 - protein, 9 aa, Homo sapiens
RKAFKSHVS

SEQ ID NO: 137556 - protein, 9 aa, Homo sapiens
KAFKSHVST

SEQ ID NO: 137557 - protein, 9 aa, Homo sapiens
AFKSHVSTL

SEQ ID NO: 137558 - protein, 9 aa, Homo sapiens
FKSHVSTLT

SEQ ID NO: 137559 - protein, 9 aa, Homo sapiens
KSHVSTLTD

SEQ ID NO: 137560 - protein, 9 aa, Homo sapiens
SHVSTLTDL

SEQ ID NO: 137561 - protein, 9 aa, Homo sapiens
HVSTLTDLQ

SEQ ID NO: 137562 - protein, 9 aa, Homo sapiens
VSTLTDLQP

SEQ ID NO: 137563 - protein, 9 aa, Homo sapiens
STLTDLQPY

SEQ ID NO: 137564 - protein, 9 aa, Homo sapiens
TLTDLQPYM

SEQ ID NO: 137565 - protein, 9 aa, Homo sapiens
LTDLQPYMR

SEQ ID NO: 137566 - protein, 9 aa, Homo sapiens
TDLQPYMRQ

SEQ ID NO: 137567 - protein, 9 aa, Homo sapiens
DLQPYMRQF

SEQ ID NO: 137568 - protein, 9 aa, Homo sapiens
LQPYMRQFV

SEQ ID NO: 137569 - protein, 9 aa, Homo sapiens
QPYMRQFVA

SEQ ID NO: 137570 - protein, 9 aa, Homo sapiens
PYMRQFVAH

SEQ ID NO: 137571 - protein, 9 aa, Homo sapiens
YMRQFVAHL

SEQ ID NO: 137572 - protein, 9 aa, Homo sapiens
MRQFVAHLQ

SEQ ID NO: 137573 - protein, 9 aa, Homo sapiens
RQFVAHLQE

SEQ ID NO: 137574 - protein, 9 aa, Homo sapiens
QFVAHLQET

SEQ ID NO: 137575 - protein, 9 aa, Homo sapiens
FVAHLQETS

SEQ ID NO: 137576 - protein, 9 aa, Homo sapiens
VAHLQETSP

SEQ ID NO: 137577 - protein, 9 aa, Homo sapiens
AHLQETSPL

SEQ ID NO: 137578 - protein, 9 aa, Homo sapiens
HLQETSPLR

SEQ ID NO: 137579 - protein, 9 aa, Homo sapiens
LQETSPLRD

SEQ ID NO: 137580 - protein, 9 aa, Homo sapiens
QETSPLRDA

SEQ ID NO: 137581 - protein, 9 aa, Homo sapiens
ETSPLRDAV

SEQ ID NO: 137582 - protein, 9 aa, Homo sapiens
TSPLRDAVV

SEQ ID NO: 137583 - protein, 9 aa, Homo sapiens
SPLRDAVVI

SEQ ID NO: 137584 - protein, 9 aa, Homo sapiens
PLRDAVVIE

SEQ ID NO: 137585 - protein, 9 aa, Homo sapiens
LRDAVVIEQ

SEQ ID NO: 137586 - protein, 9 aa, Homo sapiens
RDAVVIEQS

SEQ ID NO: 137587 - protein, 9 aa, Homo sapiens
DAVVIEQSS

SEQ ID NO: 137588 - protein, 9 aa, Homo sapiens
AVVIEQSSS

SEQ ID NO: 137589 - protein, 9 aa, Homo sapiens
VVIEQSSSL

SEQ ID NO: 137590 - protein, 9 aa, Homo sapiens
VIEQSSSLN

SEQ ID NO: 137591 - protein, 9 aa, Homo sapiens
IEQSSSLNE

SEQ ID NO: 137592 - protein, 9 aa, Homo sapiens
EQSSSLNEA

SEQ ID NO: 137593 - protein, 9 aa, Homo sapiens
QSSSLNEAS

SEQ ID NO: 137594 - protein, 9 aa, Homo sapiens
SSSLNEASS

SEQ ID NO: 137595 - protein, 9 aa, Homo sapiens
SSLNEASSG

SEQ ID NO: 137596 - protein, 9 aa, Homo sapiens
SLNEASSGL

SEQ ID NO: 137597 - protein, 9 aa, Homo sapiens
LNEASSGLF

SEQ ID NO: 137598 - protein, 9 aa, Homo sapiens
NEASSGLFD

SEQ ID NO: 137599 - protein, 9 aa, Homo sapiens
EASSGLFDV

SEQ ID NO: 137600 - protein, 9 aa, Homo sapiens
ASSGLFDVF

SEQ ID NO: 137601 - protein, 9 aa, Homo sapiens
SSGLFDVFL

SEQ ID NO: 137602 - protein, 9 aa, Homo sapiens
SGLFDVFLR

SEQ ID NO: 137603 - protein, 9 aa, Homo sapiens
GLFDVFLRF

SEQ ID NO: 137604 - protein, 9 aa, Homo sapiens
LFDVFLRFM

SEQ ID NO: 137605 - protein, 9 aa, Homo sapiens
FDVFLRFMC

SEQ ID NO: 137606 - protein, 9 aa, Homo sapiens
DVFLRFMCH

SEQ ID NO: 137607 - protein, 9 aa, Homo sapiens
VFLRFMCHH

SEQ ID NO: 137608 - protein, 9 aa, Homo sapiens
FLRFMCHHA

SEQ ID NO: 137609 - protein, 9 aa, Homo sapiens
LRFMCHHAV

SEQ ID NO: 137610 - protein, 9 aa, Homo sapiens
RFMCHHAVR

SEQ ID NO: 137611 - protein, 9 aa, Homo sapiens
FMCHHAVRI

SEQ ID NO: 137612 - protein, 9 aa, Homo sapiens
MCHHAVRIR

SEQ ID NO: 137613 - protein, 9 aa, Homo sapiens
CHHAVRIRG

SEQ ID NO: 137614 - protein, 9 aa, Homo sapiens
HHAVRIRGK

SEQ ID NO: 137615 - protein, 9 aa, Homo sapiens
HAVRIRGKS

SEQ ID NO: 137616 - protein, 9 aa, Homo sapiens
AVRIRGKSY

SEQ ID NO: 137617 - protein, 9 aa, Homo sapiens
VRIRGKSYV

SEQ ID NO: 137618 - protein, 9 aa, Homo sapiens
RIRGKSYVQ

SEQ ID NO: 137619 - protein, 9 aa, Homo sapiens
IRGKSYVQC

SEQ ID NO: 137620 - protein, 9 aa, Homo sapiens
RGKSYVQCQ

SEQ ID NO: 137621 - protein, 9 aa, Homo sapiens
GKSYVQCQG

SEQ ID NO: 137622 - protein, 9 aa, Homo sapiens
KSYVQCQGI

SEQ ID NO: 137623 - protein, 9 aa, Homo sapiens
SYVQCQGIP

SEQ ID NO: 137624 - protein, 9 aa, Homo sapiens
YVQCQGIPQ

SEQ ID NO: 137625 - protein, 9 aa, Homo sapiens
VQCQGIPQG

SEQ ID NO: 137626 - protein, 9 aa, Homo sapiens
QCQGIPQGS

SEQ ID NO: 137627 - protein, 9 aa, Homo sapiens
CQGIPQGSI

SEQ ID NO: 137628 - protein, 9 aa, Homo sapiens
QGIPQGSIL

SEQ ID NO: 137629 - protein, 9 aa, Homo sapiens
GIPQGSILS

SEQ ID NO: 137630 - protein, 9 aa, Homo sapiens
IPQGSILST

SEQ ID NO: 137631 - protein, 9 aa, Homo sapiens
PQGSILSTL

SEQ ID NO: 137632 - protein, 9 aa, Homo sapiens
QGSILSTLL

SEQ ID NO: 137633 - protein, 9 aa, Homo sapiens
GSILSTLLC

SEQ ID NO: 137634 - protein, 9 aa, Homo sapiens
SILSTLLCS

SEQ ID NO: 137635 - protein, 9 aa, Homo sapiens
ILSTLLCSL

SEQ ID NO: 137636 - protein, 9 aa, Homo sapiens
LSTLLCSLC

SEQ ID NO: 137637 - protein, 9 aa, Homo sapiens
STLLCSLCY

SEQ ID NO: 137638 - protein, 9 aa, Homo sapiens
TLLCSLCYG

SEQ ID NO: 137639 - protein, 9 aa, Homo sapiens
LLCSLCYGD

SEQ ID NO: 137640 - protein, 9 aa, Homo sapiens
LCSLCYGDM

SEQ ID NO: 137641 - protein, 9 aa, Homo sapiens
CSLCYGDME

SEQ ID NO: 137642 - protein, 9 aa, Homo sapiens
SLCYGDMEN

SEQ ID NO: 137643 - protein, 9 aa, Homo sapiens
LCYGDMENK

SEQ ID NO: 137644 - protein, 9 aa, Homo sapiens
CYGDMENKL

SEQ ID NO: 137645 - protein, 9 aa, Homo sapiens
YGDMENKLF

SEQ ID NO: 137646 - protein, 9 aa, Homo sapiens
GDMENKLFA

SEQ ID NO: 137647 - protein, 9 aa, Homo sapiens
DMENKLFAG

SEQ ID NO: 137648 - protein, 9 aa, Homo sapiens
MENKLFAGI

SEQ ID NO: 137649 - protein, 9 aa, Homo sapiens
ENKLFAGIR

SEQ ID NO: 137650 - protein, 9 aa, Homo sapiens
NKLFAGIRR

SEQ ID NO: 137651 - protein, 9 aa, Homo sapiens
KLFAGIRRD

SEQ ID NO: 137652 - protein, 9 aa, Homo sapiens
LFAGIRRDG

SEQ ID NO: 137653 - protein, 9 aa, Homo sapiens
FAGIRRDGL

SEQ ID NO: 137654 - protein, 9 aa, Homo sapiens
AGIRRDGLL

SEQ ID NO: 137655 - protein, 9 aa, Homo sapiens
GIRRDGLLL

SEQ ID NO: 137656 - protein, 9 aa, Homo sapiens
IRRDGLLLR

SEQ ID NO: 137657 - protein, 9 aa, Homo sapiens
RRDGLLLRL

SEQ ID NO: 137658 - protein, 9 aa, Homo sapiens
RDGLLLRLV

SEQ ID NO: 137659 - protein, 9 aa, Homo sapiens
DGLLLRLVD

SEQ ID NO: 137660 - protein, 9 aa, Homo sapiens
GLLLRLVDD

SEQ ID NO: 137661 - protein, 9 aa, Homo sapiens
LLLRLVDDF

SEQ ID NO: 137662 - protein, 9 aa, Homo sapiens
LLRLVDDFL

SEQ ID NO: 137663 - protein, 9 aa, Homo sapiens
LRLVDDFLL

SEQ ID NO: 137664 - protein, 9 aa, Homo sapiens
RLVDDFLLV

SEQ ID NO: 137665 - protein, 9 aa, Homo sapiens
LVDDFLLVT

SEQ ID NO: 137666 - protein, 9 aa, Homo sapiens
VDDFLLVTP

SEQ ID NO: 137667 - protein, 9 aa, Homo sapiens
DDFLLVTPH

SEQ ID NO: 137668 - protein, 9 aa, Homo sapiens
DFLLVTPHL

SEQ ID NO: 137669 - protein, 9 aa, Homo sapiens
FLLVTPHLT

SEQ ID NO: 137670 - protein, 9 aa, Homo sapiens
LLVTPHLTH

SEQ ID NO: 137671 - protein, 9 aa, Homo sapiens
LVTPHLTHA

SEQ ID NO: 137672 - protein, 9 aa, Homo sapiens
VTPHLTHAK

SEQ ID NO: 137673 - protein, 9 aa, Homo sapiens
TPHLTHAKT

SEQ ID NO: 137674 - protein, 9 aa, Homo sapiens
PHLTHAKTF

SEQ ID NO: 137675 - protein, 9 aa, Homo sapiens
HLTHAKTFL

SEQ ID NO: 137676 - protein, 9 aa, Homo sapiens
LTHAKTFLR

SEQ ID NO: 137677 - protein, 9 aa, Homo sapiens
THAKTFLRT

SEQ ID NO: 137678 - protein, 9 aa, Homo sapiens
HAKTFLRTL

SEQ ID NO: 137679 - protein, 9 aa, Homo sapiens
AKTFLRTLV

SEQ ID NO: 137680 - protein, 9 aa, Homo sapiens
KTFLRTLVR

SEQ ID NO: 137681 - protein, 9 aa, Homo sapiens
TFLRTLVRG

SEQ ID NO: 137682 - protein, 9 aa, Homo sapiens
FLRTLVRGV

SEQ ID NO: 137683 - protein, 9 aa, Homo sapiens
LRTLVRGVP

SEQ ID NO: 137684 - protein, 9 aa, Homo sapiens
RTLVRGVPE

SEQ ID NO: 137685 - protein, 9 aa, Homo sapiens
TLVRGVPEY

SEQ ID NO: 137686 - protein, 9 aa, Homo sapiens
LVRGVPEYG

SEQ ID NO: 137687 - protein, 9 aa, Homo sapiens
VRGVPEYGC

SEQ ID NO: 137688 - protein, 9 aa, Homo sapiens
RGVPEYGCV

SEQ ID NO: 137689 - protein, 9 aa, Homo sapiens
GVPEYGCVV

SEQ ID NO: 137690 - protein, 9 aa, Homo sapiens
VPEYGCVVN

SEQ ID NO: 137691 - protein, 9 aa, Homo sapiens
PEYGCVVNL

SEQ ID NO: 137692 - protein, 9 aa, Homo sapiens
EYGCVVNLR

SEQ ID NO: 137693 - protein, 9 aa, Homo sapiens
YGCVVNLRK

SEQ ID NO: 137694 - protein, 9 aa, Homo sapiens
GCVVNLRKT

SEQ ID NO: 137695 - protein, 9 aa, Homo sapiens
CVVNLRKTV

SEQ ID NO: 137696 - protein, 9 aa, Homo sapiens
VVNLRKTVV

SEQ ID NO: 137697 - protein, 9 aa, Homo sapiens
VNLRKTVVN

SEQ ID NO: 137698 - protein, 9 aa, Homo sapiens
NLRKTVVNF

SEQ ID NO: 137699 - protein, 9 aa, Homo sapiens
LRKTVVNFP

SEQ ID NO: 137700 - protein, 9 aa, Homo sapiens
RKTVVNFPV

SEQ ID NO: 137701 - protein, 9 aa, Homo sapiens
KTVVNFPVE

SEQ ID NO: 137702 - protein, 9 aa, Homo sapiens
TVVNFPVED

SEQ ID NO: 137703 - protein, 9 aa, Homo sapiens
VVNFPVEDE

SEQ ID NO: 137704 - protein, 9 aa, Homo sapiens
VNFPVEDEA

SEQ ID NO: 137705 - protein, 9 aa, Homo sapiens
NFPVEDEAL

SEQ ID NO: 137706 - protein, 9 aa, Homo sapiens
FPVEDEALG

SEQ ID NO: 137707 - protein, 9 aa, Homo sapiens
PVEDEALGG

SEQ ID NO: 137708 - protein, 9 aa, Homo sapiens
VEDEALGGT

SEQ ID NO: 137709 - protein, 9 aa, Homo sapiens
EDEALGGTA

SEQ ID NO: 137710 - protein, 9 aa, Homo sapiens
DEALGGTAF

SEQ ID NO: 137711 - protein, 9 aa, Homo sapiens
EALGGTAFV

SEQ ID NO: 137712 - protein, 9 aa, Homo sapiens
ALGGTAFVQ

SEQ ID NO: 137713 - protein, 9 aa, Homo sapiens
LGGTAFVQM

SEQ ID NO: 137714 - protein, 9 aa, Homo sapiens
GGTAFVQMP

SEQ ID NO: 137715 - protein, 9 aa, Homo sapiens
GTAFVQMPA

SEQ ID NO: 137716 - protein, 9 aa, Homo sapiens
TAFVQMPAH

SEQ ID NO: 137717 - protein, 9 aa, Homo sapiens
AFVQMPAHG

SEQ ID NO: 137718 - protein, 9 aa, Homo sapiens
FVQMPAHGL

SEQ ID NO: 137719 - protein, 9 aa, Homo sapiens
VQMPAHGLF

SEQ ID NO: 137720 - protein, 9 aa, Homo sapiens
QMPAHGLFP

SEQ ID NO: 137721 - protein, 9 aa, Homo sapiens
MPAHGLFPW

SEQ ID NO: 137722 - protein, 9 aa, Homo sapiens
PAHGLFPWC

SEQ ID NO: 137723 - protein, 9 aa, Homo sapiens
AHGLFPWCG

SEQ ID NO: 137724 - protein, 9 aa, Homo sapiens
HGLFPWCGL

SEQ ID NO: 137725 - protein, 9 aa, Homo sapiens
GLFPWCGLL

SEQ ID NO: 137726 - protein, 9 aa, Homo sapiens
LFPWCGLLL

SEQ ID NO: 137727 - protein, 9 aa, Homo sapiens
FPWCGLLLD

SEQ ID NO: 137728 - protein, 9 aa, Homo sapiens
PWCGLLLDT

SEQ ID NO: 137729 - protein, 9 aa, Homo sapiens
WCGLLLDTR

SEQ ID NO: 137730 - protein, 9 aa, Homo sapiens
CGLLLDTRT

SEQ ID NO: 137731 - protein, 9 aa, Homo sapiens
GLLLDTRTL

SEQ ID NO: 137732 - protein, 9 aa, Homo sapiens
LLLDTRTLE

SEQ ID NO: 137733 - protein, 9 aa, Homo sapiens
LLDTRTLEV

SEQ ID NO: 137734 - protein, 9 aa, Homo sapiens
LDTRTLEVQ

SEQ ID NO: 137735 - protein, 9 aa, Homo sapiens
DTRTLEVQS

SEQ ID NO: 137736 - protein, 9 aa, Homo sapiens
TRTLEVQSD

SEQ ID NO: 137737 - protein, 9 aa, Homo sapiens
RTLEVQSDY

SEQ ID NO: 137738 - protein, 9 aa, Homo sapiens
TLEVQSDYS

SEQ ID NO: 137739 - protein, 9 aa, Homo sapiens
LEVQSDYSS

SEQ ID NO: 137740 - protein, 9 aa, Homo sapiens
EVQSDYSSY

SEQ ID NO: 137741 - protein, 9 aa, Homo sapiens
VQSDYSSYA

SEQ ID NO: 137742 - protein, 9 aa, Homo sapiens
QSDYSSYAR

SEQ ID NO: 137743 - protein, 9 aa, Homo sapiens
SDYSSYART

SEQ ID NO: 137744 - protein, 9 aa, Homo sapiens
DYSSYARTS

SEQ ID NO: 137745 - protein, 9 aa, Homo sapiens
YSSYARTSI

SEQ ID NO: 137746 - protein, 9 aa, Homo sapiens
SSYARTSIR

SEQ ID NO: 137747 - protein, 9 aa, Homo sapiens
SYARTSIRA

SEQ ID NO: 137748 - protein, 9 aa, Homo sapiens
YARTSIRAS

SEQ ID NO: 137749 - protein, 9 aa, Homo sapiens
ARTSIRASL

SEQ ID NO: 137750 - protein, 9 aa, Homo sapiens
RTSIRASLT

SEQ ID NO: 137751 - protein, 9 aa, Homo sapiens
TSIRASLTF

SEQ ID NO: 137752 - protein, 9 aa, Homo sapiens
SIRASLTFN

SEQ ID NO: 137753 - protein, 9 aa, Homo sapiens
IRASLTFNR

SEQ ID NO: 137754 - protein, 9 aa, Homo sapiens
RASLTFNRG

SEQ ID NO: 137755 - protein, 9 aa, Homo sapiens
ASLTFNRGF

SEQ ID NO: 137756 - protein, 9 aa, Homo sapiens
SLTFNRGFK

SEQ ID NO: 137757 - protein, 9 aa, Homo sapiens
LTFNRGFKA

SEQ ID NO: 137758 - protein, 9 aa, Homo sapiens
TFNRGFKAG

SEQ ID NO: 137759 - protein, 9 aa, Homo sapiens
FNRGFKAGR

SEQ ID NO: 137760 - protein, 9 aa, Homo sapiens
NRGFKAGRN

SEQ ID NO: 137761 - protein, 9 aa, Homo sapiens
RGFKAGRNM

SEQ ID NO: 137762 - protein, 9 aa, Homo sapiens
GFKAGRNMR

SEQ ID NO: 137763 - protein, 9 aa, Homo sapiens
FKAGRNMRR

SEQ ID NO: 137764 - protein, 9 aa, Homo sapiens
KAGRNMRRK

SEQ ID NO: 137765 - protein, 9 aa, Homo sapiens
AGRNMRRKL

SEQ ID NO: 137766 - protein, 9 aa, Homo sapiens
GRNMRRKLF

SEQ ID NO: 137767 - protein, 9 aa, Homo sapiens
RNMRRKLFG

SEQ ID NO: 137768 - protein, 9 aa, Homo sapiens
NMRRKLFGV

SEQ ID NO: 137769 - protein, 9 aa, Homo sapiens
MRRKLFGVL

SEQ ID NO: 137770 - protein, 9 aa, Homo sapiens
RRKLFGVLR

SEQ ID NO: 137771 - protein, 9 aa, Homo sapiens
RKLFGVLRL

SEQ ID NO: 137772 - protein, 9 aa, Homo sapiens
KLFGVLRLK

SEQ ID NO: 137773 - protein, 9 aa, Homo sapiens
LFGVLRLKC

SEQ ID NO: 137774 - protein, 9 aa, Homo sapiens
FGVLRLKCH

SEQ ID NO: 137775 - protein, 9 aa, Homo sapiens
GVLRLKCHS

SEQ ID NO: 137776 - protein, 9 aa, Homo sapiens
VLRLKCHSL

SEQ ID NO: 137777 - protein, 9 aa, Homo sapiens
LRLKCHSLF

SEQ ID NO: 137778 - protein, 9 aa, Homo sapiens
RLKCHSLFL

SEQ ID NO: 137779 - protein, 9 aa, Homo sapiens
LKCHSLFLD

SEQ ID NO: 137780 - protein, 9 aa, Homo sapiens
KCHSLFLDL

SEQ ID NO: 137781 - protein, 9 aa, Homo sapiens
CHSLFLDLQ

SEQ ID NO: 137782 - protein, 9 aa, Homo sapiens
HSLFLDLQV

SEQ ID NO: 137783 - protein, 9 aa, Homo sapiens
SLFLDLQVN

SEQ ID NO: 137784 - protein, 9 aa, Homo sapiens
LFLDLQVNS

SEQ ID NO: 137785 - protein, 9 aa, Homo sapiens
FLDLQVNSL

SEQ ID NO: 137786 - protein, 9 aa, Homo sapiens
LDLQVNSLQ

SEQ ID NO: 137787 - protein, 9 aa, Homo sapiens
DLQVNSLQT

SEQ ID NO: 137788 - protein, 9 aa, Homo sapiens
LQVNSLQTV

SEQ ID NO: 137789 - protein, 9 aa, Homo sapiens
QVNSLQTVC

SEQ ID NO: 137790 - protein, 9 aa, Homo sapiens
VNSLQTVCT

SEQ ID NO: 137791 - protein, 9 aa, Homo sapiens
NSLQTVCTN

SEQ ID NO: 137792 - protein, 9 aa, Homo sapiens
SLQTVCTNI

SEQ ID NO: 137793 - protein, 9 aa, Homo sapiens
LQTVCTNIY

SEQ ID NO: 137794 - protein, 9 aa, Homo sapiens
QTVCTNIYK

SEQ ID NO: 137795 - protein, 9 aa, Homo sapiens
TVCTNIYKI

SEQ ID NO: 137796 - protein, 9 aa, Homo sapiens
VCTNIYKIL

SEQ ID NO: 137797 - protein, 9 aa, Homo sapiens
CTNIYKILL

SEQ ID NO: 137798 - protein, 9 aa, Homo sapiens
TNIYKILLL

SEQ ID NO: 137799 - protein, 9 aa, Homo sapiens
NIYKILLLQ

SEQ ID NO: 137800 - protein, 9 aa, Homo sapiens
IYKILLLQA

SEQ ID NO: 137801 - protein, 9 aa, Homo sapiens
YKILLLQAY

SEQ ID NO: 137802 - protein, 9 aa, Homo sapiens
KILLLQAYR

SEQ ID NO: 137803 - protein, 9 aa, Homo sapiens
ILLLQAYRF

SEQ ID NO: 137804 - protein, 9 aa, Homo sapiens
LLLQAYRFH

SEQ ID NO: 137805 - protein, 9 aa, Homo sapiens
LLQAYRFHA

SEQ ID NO: 137806 - protein, 9 aa, Homo sapiens
LQAYRFHAC

SEQ ID NO: 137807 - protein, 9 aa, Homo sapiens
QAYRFHACV

SEQ ID NO: 137808 - protein, 9 aa, Homo sapiens
AYRFHACVL

SEQ ID NO: 137809 - protein, 9 aa, Homo sapiens
YRFHACVLQ

SEQ ID NO: 137810 - protein, 9 aa, Homo sapiens
RFHACVLQL

SEQ ID NO: 137811 - protein, 9 aa, Homo sapiens
FHACVLQLP

SEQ ID NO: 137812 - protein, 9 aa, Homo sapiens
HACVLQLPF

SEQ ID NO: 137813 - protein, 9 aa, Homo sapiens
ACVLQLPFH

SEQ ID NO: 137814 - protein, 9 aa, Homo sapiens
CVLQLPFHQ

SEQ ID NO: 137815 - protein, 9 aa, Homo sapiens
VLQLPFHQQ

SEQ ID NO: 137816 - protein, 9 aa, Homo sapiens
LQLPFHQQV

SEQ ID NO: 137817 - protein, 9 aa, Homo sapiens
QLPFHQQVW

SEQ ID NO: 137818 - protein, 9 aa, Homo sapiens
LPFHQQVWK

SEQ ID NO: 137819 - protein, 9 aa, Homo sapiens
PFHQQVWKN

SEQ ID NO: 137820 - protein, 9 aa, Homo sapiens
FHQQVWKNP

SEQ ID NO: 137821 - protein, 9 aa, Homo sapiens
HQQVWKNPT

SEQ ID NO: 137822 - protein, 9 aa, Homo sapiens
QQVWKNPTF

SEQ ID NO: 137823 - protein, 9 aa, Homo sapiens
QVWKNPTFF

SEQ ID NO: 137824 - protein, 9 aa, Homo sapiens
VWKNPTFFL

SEQ ID NO: 137825 - protein, 9 aa, Homo sapiens
WKNPTFFLR

SEQ ID NO: 137826 - protein, 9 aa, Homo sapiens
KNPTFFLRV

SEQ ID NO: 137827 - protein, 9 aa, Homo sapiens
NPTFFLRVI

SEQ ID NO: 137828 - protein, 9 aa, Homo sapiens
PTFFLRVIS

SEQ ID NO: 137829 - protein, 9 aa, Homo sapiens
TFFLRVISD

SEQ ID NO: 137830 - protein, 9 aa, Homo sapiens
FFLRVISDT

SEQ ID NO: 137831 - protein, 9 aa, Homo sapiens
FLRVISDTA

SEQ ID NO: 137832 - protein, 9 aa, Homo sapiens
LRVISDTAS

SEQ ID NO: 137833 - protein, 9 aa, Homo sapiens
RVISDTASL

SEQ ID NO: 137834 - protein, 9 aa, Homo sapiens
VISDTASLC

SEQ ID NO: 137835 - protein, 9 aa, Homo sapiens
ISDTASLCY

SEQ ID NO: 137836 - protein, 9 aa, Homo sapiens
SDTASLCYS

SEQ ID NO: 137837 - protein, 9 aa, Homo sapiens
DTASLCYSI

SEQ ID NO: 137838 - protein, 9 aa, Homo sapiens
TASLCYSIL

SEQ ID NO: 137839 - protein, 9 aa, Homo sapiens
ASLCYSILK

SEQ ID NO: 137840 - protein, 9 aa, Homo sapiens
SLCYSILKA

SEQ ID NO: 137841 - protein, 9 aa, Homo sapiens
LCYSILKAK

SEQ ID NO: 137842 - protein, 9 aa, Homo sapiens
CYSILKAKN

SEQ ID NO: 137843 - protein, 9 aa, Homo sapiens
YSILKAKNA

SEQ ID NO: 137844 - protein, 9 aa, Homo sapiens
SILKAKNAG

SEQ ID NO: 137845 - protein, 9 aa, Homo sapiens
ILKAKNAGM

SEQ ID NO: 137846 - protein, 9 aa, Homo sapiens
LKAKNAGMS

SEQ ID NO: 137847 - protein, 9 aa, Homo sapiens
KAKNAGMSL

SEQ ID NO: 137848 - protein, 9 aa, Homo sapiens
AKNAGMSLG

SEQ ID NO: 137849 - protein, 9 aa, Homo sapiens
KNAGMSLGA

SEQ ID NO: 137850 - protein, 9 aa, Homo sapiens
NAGMSLGAK

SEQ ID NO: 137851 - protein, 9 aa, Homo sapiens
AGMSLGAKG

SEQ ID NO: 137852 - protein, 9 aa, Homo sapiens
GMSLGAKGA

SEQ ID NO: 137853 - protein, 9 aa, Homo sapiens
MSLGAKGAA

SEQ ID NO: 137854 - protein, 9 aa, Homo sapiens
SLGAKGAAG

SEQ ID NO: 137855 - protein, 9 aa, Homo sapiens
LGAKGAAGP

SEQ ID NO: 137856 - protein, 9 aa, Homo sapiens
GAKGAAGPL

SEQ ID NO: 137857 - protein, 9 aa, Homo sapiens
AKGAAGPLP

SEQ ID NO: 137858 - protein, 9 aa, Homo sapiens
KGAAGPLPS

SEQ ID NO: 137859 - protein, 9 aa, Homo sapiens
GAAGPLPSE

SEQ ID NO: 137860 - protein, 9 aa, Homo sapiens
AAGPLPSEA

SEQ ID NO: 137861 - protein, 9 aa, Homo sapiens
AGPLPSEAV

SEQ ID NO: 137862 - protein, 9 aa, Homo sapiens
GPLPSEAVQ

SEQ ID NO: 137863 - protein, 9 aa, Homo sapiens
PLPSEAVQW

SEQ ID NO: 137864 - protein, 9 aa, Homo sapiens
LPSEAVQWL

SEQ ID NO: 137865 - protein, 9 aa, Homo sapiens
PSEAVQWLC

SEQ ID NO: 137866 - protein, 9 aa, Homo sapiens
SEAVQWLCH

SEQ ID NO: 137867 - protein, 9 aa, Homo sapiens
EAVQWLCHQ

SEQ ID NO: 137868 - protein, 9 aa, Homo sapiens
AVQWLCHQA

SEQ ID NO: 137869 - protein, 9 aa, Homo sapiens
VQWLCHQAF

SEQ ID NO: 137870 - protein, 9 aa, Homo sapiens
QWLCHQAFL

SEQ ID NO: 137871 - protein, 9 aa, Homo sapiens
WLCHQAFLL

SEQ ID NO: 137872 - protein, 9 aa, Homo sapiens
LCHQAFLLK

SEQ ID NO: 137873 - protein, 9 aa, Homo sapiens
CHQAFLLKL

SEQ ID NO: 137874 - protein, 9 aa, Homo sapiens
HQAFLLKLT

SEQ ID NO: 137875 - protein, 9 aa, Homo sapiens
QAFLLKLTR

SEQ ID NO: 137876 - protein, 9 aa, Homo sapiens
AFLLKLTRH

SEQ ID NO: 137877 - protein, 9 aa, Homo sapiens
FLLKLTRHR

SEQ ID NO: 137878 - protein, 9 aa, Homo sapiens
LLKLTRHRV

SEQ ID NO: 137879 - protein, 9 aa, Homo sapiens
LKLTRHRVT

SEQ ID NO: 137880 - protein, 9 aa, Homo sapiens
KLTRHRVTY

SEQ ID NO: 137881 - protein, 9 aa, Homo sapiens
LTRHRVTYV

SEQ ID NO: 137882 - protein, 9 aa, Homo sapiens
TRHRVTYVP

SEQ ID NO: 137883 - protein, 9 aa, Homo sapiens
RHRVTYVPL

SEQ ID NO: 137884 - protein, 9 aa, Homo sapiens
HRVTYVPLL

SEQ ID NO: 137885 - protein, 9 aa, Homo sapiens
RVTYVPLLG

SEQ ID NO: 137886 - protein, 9 aa, Homo sapiens
VTYVPLLGS

SEQ ID NO: 137887 - protein, 9 aa, Homo sapiens
TYVPLLGSL

SEQ ID NO: 137888 - protein, 9 aa, Homo sapiens
YVPLLGSLR

SEQ ID NO: 137889 - protein, 9 aa, Homo sapiens
VPLLGSLRT

SEQ ID NO: 137890 - protein, 9 aa, Homo sapiens
PLLGSLRTA

SEQ ID NO: 137891 - protein, 9 aa, Homo sapiens
LLGSLRTAQ

SEQ ID NO: 137892 - protein, 9 aa, Homo sapiens
LGSLRTAQT

SEQ ID NO: 137893 - protein, 9 aa, Homo sapiens
GSLRTAQTQ

SEQ ID NO: 137894 - protein, 9 aa, Homo sapiens
SLRTAQTQL

SEQ ID NO: 137895 - protein, 9 aa, Homo sapiens
LRTAQTQLS

SEQ ID NO: 137896 - protein, 9 aa, Homo sapiens
RTAQTQLSR

SEQ ID NO: 137897 - protein, 9 aa, Homo sapiens
TAQTQLSRK

SEQ ID NO: 137898 - protein, 9 aa, Homo sapiens
AQTQLSRKL

SEQ ID NO: 137899 - protein, 9 aa, Homo sapiens
QTQLSRKLP

SEQ ID NO: 137900 - protein, 9 aa, Homo sapiens
TQLSRKLPG

SEQ ID NO: 137901 - protein, 9 aa, Homo sapiens
QLSRKLPGT

SEQ ID NO: 137902 - protein, 9 aa, Homo sapiens
LSRKLPGTT

SEQ ID NO: 137903 - protein, 9 aa, Homo sapiens
SRKLPGTTL

SEQ ID NO: 137904 - protein, 9 aa, Homo sapiens
RKLPGTTLT

SEQ ID NO: 137905 - protein, 9 aa, Homo sapiens
KLPGTTLTA

SEQ ID NO: 137906 - protein, 9 aa, Homo sapiens
LPGTTLTAL

SEQ ID NO: 137907 - protein, 9 aa, Homo sapiens
PGTTLTALE

SEQ ID NO: 137908 - protein, 9 aa, Homo sapiens
GTTLTALEA

SEQ ID NO: 137909 - protein, 9 aa, Homo sapiens
TTLTALEAA

SEQ ID NO: 137910 - protein, 9 aa, Homo sapiens
TLTALEAAA

SEQ ID NO: 137911 - protein, 9 aa, Homo sapiens
LTALEAAAN

SEQ ID NO: 137912 - protein, 9 aa, Homo sapiens
TALEAAANP

SEQ ID NO: 137913 - protein, 9 aa, Homo sapiens
ALEAAANPA

SEQ ID NO: 137914 - protein, 9 aa, Homo sapiens
LEAAANPAL

SEQ ID NO: 137915 - protein, 9 aa, Homo sapiens
EAAANPALP

SEQ ID NO: 137916 - protein, 9 aa, Homo sapiens
AAANPALPS

SEQ ID NO: 137917 - protein, 9 aa, Homo sapiens
AANPALPSD

SEQ ID NO: 137918 - protein, 9 aa, Homo sapiens
ANPALPSDF

SEQ ID NO: 137919 - protein, 9 aa, Homo sapiens
NPALPSDFK

SEQ ID NO: 137920 - protein, 9 aa, Homo sapiens
PALPSDFKT

SEQ ID NO: 137921 - protein, 9 aa, Homo sapiens
ALPSDFKTI

SEQ ID NO: 137922 - protein, 9 aa, Homo sapiens
LPSDFKTIL

SEQ ID NO: 137923 - protein, 9 aa, Homo sapiens
PSDFKTILD

SEQ ID NO: 137924 - protein, 9 aa, Homo sapiens
MVPSAGQLA

SEQ ID NO: 137925 - protein, 9 aa, Homo sapiens
VPSAGQLAL

SEQ ID NO: 137926 - protein, 9 aa, Homo sapiens
PSAGQLALF

SEQ ID NO: 137927 - protein, 9 aa, Homo sapiens
SAGQLALFA

SEQ ID NO: 137928 - protein, 9 aa, Homo sapiens
AGQLALFAL

SEQ ID NO: 137929 - protein, 9 aa, Homo sapiens
GQLALFALG

SEQ ID NO: 137930 - protein, 9 aa, Homo sapiens
QLALFALGI

SEQ ID NO: 137931 - protein, 9 aa, Homo sapiens
LALFALGIV

SEQ ID NO: 137932 - protein, 9 aa, Homo sapiens
ALFALGIVL

SEQ ID NO: 137933 - protein, 9 aa, Homo sapiens
LFALGIVLA

SEQ ID NO: 137934 - protein, 9 aa, Homo sapiens
FALGIVLAA

SEQ ID NO: 137935 - protein, 9 aa, Homo sapiens
ALGIVLAAC

SEQ ID NO: 137936 - protein, 9 aa, Homo sapiens
LGIVLAACQ

SEQ ID NO: 137937 - protein, 9 aa, Homo sapiens
GIVLAACQA

SEQ ID NO: 137938 - protein, 9 aa, Homo sapiens
IVLAACQAL

SEQ ID NO: 137939 - protein, 9 aa, Homo sapiens
VLAACQALE

SEQ ID NO: 137940 - protein, 9 aa, Homo sapiens
LAACQALEN

SEQ ID NO: 137941 - protein, 9 aa, Homo sapiens
AACQALENS

SEQ ID NO: 137942 - protein, 9 aa, Homo sapiens
ACQALENST

SEQ ID NO: 137943 - protein, 9 aa, Homo sapiens
CQALENSTS

SEQ ID NO: 137944 - protein, 9 aa, Homo sapiens
QALENSTSP

SEQ ID NO: 137945 - protein, 9 aa, Homo sapiens
ALENSTSPL

SEQ ID NO: 137946 - protein, 9 aa, Homo sapiens
LENSTSPLS

SEQ ID NO: 137947 - protein, 9 aa, Homo sapiens
ENSTSPLSA

SEQ ID NO: 137948 - protein, 9 aa, Homo sapiens
NSTSPLSAD

SEQ ID NO: 137949 - protein, 9 aa, Homo sapiens
STSPLSADP

SEQ ID NO: 137950 - protein, 9 aa, Homo sapiens
TSPLSADPP

SEQ ID NO: 137951 - protein, 9 aa, Homo sapiens
SPLSADPPV

SEQ ID NO: 137952 - protein, 9 aa, Homo sapiens
PLSADPPVA

SEQ ID NO: 137953 - protein, 9 aa, Homo sapiens
LSADPPVAA

SEQ ID NO: 137954 - protein, 9 aa, Homo sapiens
SADPPVAAA

SEQ ID NO: 137955 - protein, 9 aa, Homo sapiens
ADPPVAAAV

SEQ ID NO: 137956 - protein, 9 aa, Homo sapiens
DPPVAAAVV

SEQ ID NO: 137957 - protein, 9 aa, Homo sapiens
PPVAAAVVS

SEQ ID NO: 137958 - protein, 9 aa, Homo sapiens
PVAAAVVSH

SEQ ID NO: 137959 - protein, 9 aa, Homo sapiens
VAAAVVSHF

SEQ ID NO: 137960 - protein, 9 aa, Homo sapiens
AAAVVSHFN

SEQ ID NO: 137961 - protein, 9 aa, Homo sapiens
AAVVSHFND

SEQ ID NO: 137962 - protein, 9 aa, Homo sapiens
AVVSHFNDC

SEQ ID NO: 137963 - protein, 9 aa, Homo sapiens
VVSHFNDCP

SEQ ID NO: 137964 - protein, 9 aa, Homo sapiens
VSHFNDCPD

SEQ ID NO: 137965 - protein, 9 aa, Homo sapiens
SHFNDCPDS

SEQ ID NO: 137966 - protein, 9 aa, Homo sapiens
HFNDCPDSH

SEQ ID NO: 137967 - protein, 9 aa, Homo sapiens
FNDCPDSHT

SEQ ID NO: 137968 - protein, 9 aa, Homo sapiens
NDCPDSHTQ

SEQ ID NO: 137969 - protein, 9 aa, Homo sapiens
DCPDSHTQF

SEQ ID NO: 137970 - protein, 9 aa, Homo sapiens
CPDSHTQFC

SEQ ID NO: 137971 - protein, 9 aa, Homo sapiens
PDSHTQFCF

SEQ ID NO: 137972 - protein, 9 aa, Homo sapiens
DSHTQFCFH

SEQ ID NO: 137973 - protein, 9 aa, Homo sapiens
SHTQFCFHG

SEQ ID NO: 137974 - protein, 9 aa, Homo sapiens
HTQFCFHGT

SEQ ID NO: 137975 - protein, 9 aa, Homo sapiens
TQFCFHGTC

SEQ ID NO: 137976 - protein, 9 aa, Homo sapiens
QFCFHGTCR

SEQ ID NO: 137977 - protein, 9 aa, Homo sapiens
FCFHGTCRF

SEQ ID NO: 137978 - protein, 9 aa, Homo sapiens
CFHGTCRFL

SEQ ID NO: 137979 - protein, 9 aa, Homo sapiens
FHGTCRFLV

SEQ ID NO: 137980 - protein, 9 aa, Homo sapiens
HGTCRFLVQ

SEQ ID NO: 137981 - protein, 9 aa, Homo sapiens
GTCRFLVQE

SEQ ID NO: 137982 - protein, 9 aa, Homo sapiens
TCRFLVQED

SEQ ID NO: 137983 - protein, 9 aa, Homo sapiens
CRFLVQEDK

SEQ ID NO: 137984 - protein, 9 aa, Homo sapiens
RFLVQEDKP

SEQ ID NO: 137985 - protein, 9 aa, Homo sapiens
FLVQEDKPA

SEQ ID NO: 137986 - protein, 9 aa, Homo sapiens
LVQEDKPAC

SEQ ID NO: 137987 - protein, 9 aa, Homo sapiens
VQEDKPACV

SEQ ID NO: 137988 - protein, 9 aa, Homo sapiens
QEDKPACVC

SEQ ID NO: 137989 - protein, 9 aa, Homo sapiens
EDKPACVCH

SEQ ID NO: 137990 - protein, 9 aa, Homo sapiens
DKPACVCHS

SEQ ID NO: 137991 - protein, 9 aa, Homo sapiens
KPACVCHSG

SEQ ID NO: 137992 - protein, 9 aa, Homo sapiens
PACVCHSGY

SEQ ID NO: 137993 - protein, 9 aa, Homo sapiens
ACVCHSGYV

SEQ ID NO: 137994 - protein, 9 aa, Homo sapiens
CVCHSGYVG

SEQ ID NO: 137995 - protein, 9 aa, Homo sapiens
VCHSGYVGA

SEQ ID NO: 137996 - protein, 9 aa, Homo sapiens
CHSGYVGAR

SEQ ID NO: 137997 - protein, 9 aa, Homo sapiens
HSGYVGARC

SEQ ID NO: 137998 - protein, 9 aa, Homo sapiens
SGYVGARCE

SEQ ID NO: 137999 - protein, 9 aa, Homo sapiens
GYVGARCEH

SEQ ID NO: 138000 - protein, 9 aa, Homo sapiens
YVGARCEHA

SEQ ID NO: 138001 - protein, 9 aa, Homo sapiens
VGARCEHAD

SEQ ID NO: 138002 - protein, 9 aa, Homo sapiens
GARCEHADL

SEQ ID NO: 138003 - protein, 9 aa, Homo sapiens
ARCEHADLL

SEQ ID NO: 138004 - protein, 9 aa, Homo sapiens
RCEHADLLA

SEQ ID NO: 138005 - protein, 9 aa, Homo sapiens
CEHADLLAV

SEQ ID NO: 138006 - protein, 9 aa, Homo sapiens
EHADLLAVV

SEQ ID NO: 138007 - protein, 9 aa, Homo sapiens
HADLLAVVA

SEQ ID NO: 138008 - protein, 9 aa, Homo sapiens
ADLLAVVAA

SEQ ID NO: 138009 - protein, 9 aa, Homo sapiens
DLLAVVAAS

SEQ ID NO: 138010 - protein, 9 aa, Homo sapiens
LLAVVAASQ

SEQ ID NO: 138011 - protein, 9 aa, Homo sapiens
LAVVAASQK

SEQ ID NO: 138012 - protein, 9 aa, Homo sapiens
AVVAASQKK

SEQ ID NO: 138013 - protein, 9 aa, Homo sapiens
VVAASQKKQ

SEQ ID NO: 138014 - protein, 9 aa, Homo sapiens
VAASQKKQA

SEQ ID NO: 138015 - protein, 9 aa, Homo sapiens
AASQKKQAI

SEQ ID NO: 138016 - protein, 9 aa, Homo sapiens
ASQKKQAIT

SEQ ID NO: 138017 - protein, 9 aa, Homo sapiens
SQKKQAITA

SEQ ID NO: 138018 - protein, 9 aa, Homo sapiens
QKKQAITAL

SEQ ID NO: 138019 - protein, 9 aa, Homo sapiens
KKQAITALV

SEQ ID NO: 138020 - protein, 9 aa, Homo sapiens
KQAITALVV

SEQ ID NO: 138021 - protein, 9 aa, Homo sapiens
QAITALVVV

SEQ ID NO: 138022 - protein, 9 aa, Homo sapiens
AITALVVVS

SEQ ID NO: 138023 - protein, 9 aa, Homo sapiens
ITALVVVSI

SEQ ID NO: 138024 - protein, 9 aa, Homo sapiens
TALVVVSIV

SEQ ID NO: 138025 - protein, 9 aa, Homo sapiens
ALVVVSIVA

SEQ ID NO: 138026 - protein, 9 aa, Homo sapiens
LVVVSIVAL

SEQ ID NO: 138027 - protein, 9 aa, Homo sapiens
VVVSIVALA

SEQ ID NO: 138028 - protein, 9 aa, Homo sapiens
VVSIVALAV

SEQ ID NO: 138029 - protein, 9 aa, Homo sapiens
VSIVALAVL

SEQ ID NO: 138030 - protein, 9 aa, Homo sapiens
SIVALAVLI

SEQ ID NO: 138031 - protein, 9 aa, Homo sapiens
IVALAVLII

SEQ ID NO: 138032 - protein, 9 aa, Homo sapiens
VALAVLIIT

SEQ ID NO: 138033 - protein, 9 aa, Homo sapiens
ALAVLIITC

SEQ ID NO: 138034 - protein, 9 aa, Homo sapiens
LAVLIITCV

SEQ ID NO: 138035 - protein, 9 aa, Homo sapiens
AVLIITCVL

SEQ ID NO: 138036 - protein, 9 aa, Homo sapiens
VLIITCVLI

SEQ ID NO: 138037 - protein, 9 aa, Homo sapiens
LIITCVLIH

SEQ ID NO: 138038 - protein, 9 aa, Homo sapiens
IITCVLIHC

SEQ ID NO: 138039 - protein, 9 aa, Homo sapiens
ITCVLIHCC

SEQ ID NO: 138040 - protein, 9 aa, Homo sapiens
TCVLIHCCQ

SEQ ID NO: 138041 - protein, 9 aa, Homo sapiens
CVLIHCCQV

SEQ ID NO: 138042 - protein, 9 aa, Homo sapiens
VLIHCCQVR

SEQ ID NO: 138043 - protein, 9 aa, Homo sapiens
LIHCCQVRK

SEQ ID NO: 138044 - protein, 9 aa, Homo sapiens
IHCCQVRKH

SEQ ID NO: 138045 - protein, 9 aa, Homo sapiens
HCCQVRKHC

SEQ ID NO: 138046 - protein, 9 aa, Homo sapiens
CCQVRKHCE

SEQ ID NO: 138047 - protein, 9 aa, Homo sapiens
CQVRKHCEW

SEQ ID NO: 138048 - protein, 9 aa, Homo sapiens
QVRKHCEWC

SEQ ID NO: 138049 - protein, 9 aa, Homo sapiens
VRKHCEWCR

SEQ ID NO: 138050 - protein, 9 aa, Homo sapiens
RKHCEWCRA

SEQ ID NO: 138051 - protein, 9 aa, Homo sapiens
KHCEWCRAL

SEQ ID NO: 138052 - protein, 9 aa, Homo sapiens
HCEWCRALI

SEQ ID NO: 138053 - protein, 9 aa, Homo sapiens
CEWCRALIC

SEQ ID NO: 138054 - protein, 9 aa, Homo sapiens
EWCRALICR

SEQ ID NO: 138055 - protein, 9 aa, Homo sapiens
WCRALICRH

SEQ ID NO: 138056 - protein, 9 aa, Homo sapiens
CRALICRHE

SEQ ID NO: 138057 - protein, 9 aa, Homo sapiens
RALICRHEK

SEQ ID NO: 138058 - protein, 9 aa, Homo sapiens
ALICRHEKP

SEQ ID NO: 138059 - protein, 9 aa, Homo sapiens
LICRHEKPS

SEQ ID NO: 138060 - protein, 9 aa, Homo sapiens
ICRHEKPSA

SEQ ID NO: 138061 - protein, 9 aa, Homo sapiens
CRHEKPSAL

SEQ ID NO: 138062 - protein, 9 aa, Homo sapiens
RHEKPSALL

SEQ ID NO: 138063 - protein, 9 aa, Homo sapiens
HEKPSALLK

SEQ ID NO: 138064 - protein, 9 aa, Homo sapiens
EKPSALLKG

SEQ ID NO: 138065 - protein, 9 aa, Homo sapiens
KPSALLKGR

SEQ ID NO: 138066 - protein, 9 aa, Homo sapiens
PSALLKGRT

SEQ ID NO: 138067 - protein, 9 aa, Homo sapiens
SALLKGRTA

SEQ ID NO: 138068 - protein, 9 aa, Homo sapiens
ALLKGRTAC

SEQ ID NO: 138069 - protein, 9 aa, Homo sapiens
LLKGRTACC

SEQ ID NO: 138070 - protein, 9 aa, Homo sapiens
LKGRTACCH

SEQ ID NO: 138071 - protein, 9 aa, Homo sapiens
KGRTACCHS

SEQ ID NO: 138072 - protein, 9 aa, Homo sapiens
GRTACCHSE

SEQ ID NO: 138073 - protein, 9 aa, Homo sapiens
RTACCHSET

SEQ ID NO: 138074 - protein, 9 aa, Homo sapiens
TACCHSETV

SEQ ID NO: 138075 - protein, 9 aa, Homo sapiens
ACCHSETVV

SEQ ID NO: 138076 - protein, 9 aa, Homo sapiens
MVPSAGQLA

SEQ ID NO: 138077 - protein, 9 aa, Homo sapiens
VPSAGQLAL

SEQ ID NO: 138078 - protein, 9 aa, Homo sapiens
PSAGQLALF

SEQ ID NO: 138079 - protein, 9 aa, Homo sapiens
SAGQLALFA

SEQ ID NO: 138080 - protein, 9 aa, Homo sapiens
AGQLALFAL

SEQ ID NO: 138081 - protein, 9 aa, Homo sapiens
GQLALFALG

SEQ ID NO: 138082 - protein, 9 aa, Homo sapiens
QLALFALGI

SEQ ID NO: 138083 - protein, 9 aa, Homo sapiens
LALFALGIV

SEQ ID NO: 138084 - protein, 9 aa, Homo sapiens
ALFALGIVL

SEQ ID NO: 138085 - protein, 9 aa, Homo sapiens
LFALGIVLA

SEQ ID NO: 138086 - protein, 9 aa, Homo sapiens
FALGIVLAA

SEQ ID NO: 138087 - protein, 9 aa, Homo sapiens
ALGIVLAAC

SEQ ID NO: 138088 - protein, 9 aa, Homo sapiens
LGIVLAACQ

SEQ ID NO: 138089 - protein, 9 aa, Homo sapiens
GIVLAACQA

SEQ ID NO: 138090 - protein, 9 aa, Homo sapiens
IVLAACQAL

SEQ ID NO: 138091 - protein, 9 aa, Homo sapiens
VLAACQALE

SEQ ID NO: 138092 - protein, 9 aa, Homo sapiens
LAACQALEN

SEQ ID NO: 138093 - protein, 9 aa, Homo sapiens
AACQALENS

SEQ ID NO: 138094 - protein, 9 aa, Homo sapiens
ACQALENST

SEQ ID NO: 138095 - protein, 9 aa, Homo sapiens
CQALENSTS

SEQ ID NO: 138096 - protein, 9 aa, Homo sapiens
QALENSTSP

SEQ ID NO: 138097 - protein, 9 aa, Homo sapiens
ALENSTSPL

SEQ ID NO: 138098 - protein, 9 aa, Homo sapiens
LENSTSPLS

SEQ ID NO: 138099 - protein, 9 aa, Homo sapiens
ENSTSPLSD

SEQ ID NO: 138100 - protein, 9 aa, Homo sapiens
NSTSPLSDP

SEQ ID NO: 138101 - protein, 9 aa, Homo sapiens
STSPLSDPP

SEQ ID NO: 138102 - protein, 9 aa, Homo sapiens
TSPLSDPPV

SEQ ID NO: 138103 - protein, 9 aa, Homo sapiens
SPLSDPPVA

SEQ ID NO: 138104 - protein, 9 aa, Homo sapiens
PLSDPPVAA

SEQ ID NO: 138105 - protein, 9 aa, Homo sapiens
LSDPPVAAA

SEQ ID NO: 138106 - protein, 9 aa, Homo sapiens
SDPPVAAAV

SEQ ID NO: 138107 - protein, 9 aa, Homo sapiens
DPPVAAAVV

SEQ ID NO: 138108 - protein, 9 aa, Homo sapiens
PPVAAAVVS

SEQ ID NO: 138109 - protein, 9 aa, Homo sapiens
PVAAAVVSH

SEQ ID NO: 138110 - protein, 9 aa, Homo sapiens
VAAAVVSHF

SEQ ID NO: 138111 - protein, 9 aa, Homo sapiens
AAAVVSHFN

SEQ ID NO: 138112 - protein, 9 aa, Homo sapiens
AAVVSHFND

SEQ ID NO: 138113 - protein, 9 aa, Homo sapiens
AVVSHFNDC

SEQ ID NO: 138114 - protein, 9 aa, Homo sapiens
VVSHFNDCP

SEQ ID NO: 138115 - protein, 9 aa, Homo sapiens
VSHFNDCPD

SEQ ID NO: 138116 - protein, 9 aa, Homo sapiens
SHFNDCPDS

SEQ ID NO: 138117 - protein, 9 aa, Homo sapiens
HFNDCPDSH

SEQ ID NO: 138118 - protein, 9 aa, Homo sapiens
FNDCPDSHT

SEQ ID NO: 138119 - protein, 9 aa, Homo sapiens
NDCPDSHTQ

SEQ ID NO: 138120 - protein, 9 aa, Homo sapiens
DCPDSHTQF

SEQ ID NO: 138121 - protein, 9 aa, Homo sapiens
CPDSHTQFC

SEQ ID NO: 138122 - protein, 9 aa, Homo sapiens
PDSHTQFCF

SEQ ID NO: 138123 - protein, 9 aa, Homo sapiens
DSHTQFCFH

SEQ ID NO: 138124 - protein, 9 aa, Homo sapiens
SHTQFCFHG

SEQ ID NO: 138125 - protein, 9 aa, Homo sapiens
HTQFCFHGT

SEQ ID NO: 138126 - protein, 9 aa, Homo sapiens
TQFCFHGTC

SEQ ID NO: 138127 - protein, 9 aa, Homo sapiens
QFCFHGTCR

SEQ ID NO: 138128 - protein, 9 aa, Homo sapiens
FCFHGTCRF

SEQ ID NO: 138129 - protein, 9 aa, Homo sapiens
CFHGTCRFL

SEQ ID NO: 138130 - protein, 9 aa, Homo sapiens
FHGTCRFLV

SEQ ID NO: 138131 - protein, 9 aa, Homo sapiens
HGTCRFLVQ

SEQ ID NO: 138132 - protein, 9 aa, Homo sapiens
GTCRFLVQE

SEQ ID NO: 138133 - protein, 9 aa, Homo sapiens
TCRFLVQED

SEQ ID NO: 138134 - protein, 9 aa, Homo sapiens
CRFLVQEDK

SEQ ID NO: 138135 - protein, 9 aa, Homo sapiens
RFLVQEDKP

SEQ ID NO: 138136 - protein, 9 aa, Homo sapiens
FLVQEDKPA

SEQ ID NO: 138137 - protein, 9 aa, Homo sapiens
LVQEDKPAC

SEQ ID NO: 138138 - protein, 9 aa, Homo sapiens
VQEDKPACV

SEQ ID NO: 138139 - protein, 9 aa, Homo sapiens
QEDKPACVC

SEQ ID NO: 138140 - protein, 9 aa, Homo sapiens
EDKPACVCH

SEQ ID NO: 138141 - protein, 9 aa, Homo sapiens
DKPACVCHS

SEQ ID NO: 138142 - protein, 9 aa, Homo sapiens
KPACVCHSG

SEQ ID NO: 138143 - protein, 9 aa, Homo sapiens
PACVCHSGY

SEQ ID NO: 138144 - protein, 9 aa, Homo sapiens
ACVCHSGYV

SEQ ID NO: 138145 - protein, 9 aa, Homo sapiens
CVCHSGYVG

SEQ ID NO: 138146 - protein, 9 aa, Homo sapiens
VCHSGYVGA

SEQ ID NO: 138147 - protein, 9 aa, Homo sapiens
CHSGYVGAR

SEQ ID NO: 138148 - protein, 9 aa, Homo sapiens
HSGYVGARC

SEQ ID NO: 138149 - protein, 9 aa, Homo sapiens
SGYVGARCE

SEQ ID NO: 138150 - protein, 9 aa, Homo sapiens
GYVGARCEH

SEQ ID NO: 138151 - protein, 9 aa, Homo sapiens
YVGARCEHA

SEQ ID NO: 138152 - protein, 9 aa, Homo sapiens
VGARCEHAD

SEQ ID NO: 138153 - protein, 9 aa, Homo sapiens
GARCEHADL

SEQ ID NO: 138154 - protein, 9 aa, Homo sapiens
ARCEHADLL

SEQ ID NO: 138155 - protein, 9 aa, Homo sapiens
RCEHADLLA

SEQ ID NO: 138156 - protein, 9 aa, Homo sapiens
CEHADLLAV

SEQ ID NO: 138157 - protein, 9 aa, Homo sapiens
EHADLLAVV

SEQ ID NO: 138158 - protein, 9 aa, Homo sapiens
HADLLAVVA

SEQ ID NO: 138159 - protein, 9 aa, Homo sapiens
ADLLAVVAA

SEQ ID NO: 138160 - protein, 9 aa, Homo sapiens
DLLAVVAAS

SEQ ID NO: 138161 - protein, 9 aa, Homo sapiens
LLAVVAASQ

SEQ ID NO: 138162 - protein, 9 aa, Homo sapiens
LAVVAASQK

SEQ ID NO: 138163 - protein, 9 aa, Homo sapiens
AVVAASQKK

SEQ ID NO: 138164 - protein, 9 aa, Homo sapiens
VVAASQKKQ

SEQ ID NO: 138165 - protein, 9 aa, Homo sapiens
VAASQKKQA

SEQ ID NO: 138166 - protein, 9 aa, Homo sapiens
AASQKKQAI

SEQ ID NO: 138167 - protein, 9 aa, Homo sapiens
ASQKKQAIT

SEQ ID NO: 138168 - protein, 9 aa, Homo sapiens
SQKKQAITA

SEQ ID NO: 138169 - protein, 9 aa, Homo sapiens
QKKQAITAL

SEQ ID NO: 138170 - protein, 9 aa, Homo sapiens
KKQAITALV

SEQ ID NO: 138171 - protein, 9 aa, Homo sapiens
KQAITALVV

SEQ ID NO: 138172 - protein, 9 aa, Homo sapiens
QAITALVVV

SEQ ID NO: 138173 - protein, 9 aa, Homo sapiens
AITALVVVS

SEQ ID NO: 138174 - protein, 9 aa, Homo sapiens
ITALVVVSI

SEQ ID NO: 138175 - protein, 9 aa, Homo sapiens
TALVVVSIV

SEQ ID NO: 138176 - protein, 9 aa, Homo sapiens
ALVVVSIVA

SEQ ID NO: 138177 - protein, 9 aa, Homo sapiens
LVVVSIVAL

SEQ ID NO: 138178 - protein, 9 aa, Homo sapiens
VVVSIVALA

SEQ ID NO: 138179 - protein, 9 aa, Homo sapiens
VVSIVALAV

SEQ ID NO: 138180 - protein, 9 aa, Homo sapiens
VSIVALAVL

SEQ ID NO: 138181 - protein, 9 aa, Homo sapiens
SIVALAVLI

SEQ ID NO: 138182 - protein, 9 aa, Homo sapiens
IVALAVLII

SEQ ID NO: 138183 - protein, 9 aa, Homo sapiens
VALAVLIIT

SEQ ID NO: 138184 - protein, 9 aa, Homo sapiens
ALAVLIITC

SEQ ID NO: 138185 - protein, 9 aa, Homo sapiens
LAVLIITCV

SEQ ID NO: 138186 - protein, 9 aa, Homo sapiens
AVLIITCVL

SEQ ID NO: 138187 - protein, 9 aa, Homo sapiens
VLIITCVLI

SEQ ID NO: 138188 - protein, 9 aa, Homo sapiens
LIITCVLIH

SEQ ID NO: 138189 - protein, 9 aa, Homo sapiens
IITCVLIHC

SEQ ID NO: 138190 - protein, 9 aa, Homo sapiens
ITCVLIHCC

SEQ ID NO: 138191 - protein, 9 aa, Homo sapiens
TCVLIHCCQ

SEQ ID NO: 138192 - protein, 9 aa, Homo sapiens
CVLIHCCQV

SEQ ID NO: 138193 - protein, 9 aa, Homo sapiens
VLIHCCQVR

SEQ ID NO: 138194 - protein, 9 aa, Homo sapiens
LIHCCQVRK

SEQ ID NO: 138195 - protein, 9 aa, Homo sapiens
IHCCQVRKH

SEQ ID NO: 138196 - protein, 9 aa, Homo sapiens
HCCQVRKHC

SEQ ID NO: 138197 - protein, 9 aa, Homo sapiens
CCQVRKHCE

SEQ ID NO: 138198 - protein, 9 aa, Homo sapiens
CQVRKHCEW

SEQ ID NO: 138199 - protein, 9 aa, Homo sapiens
QVRKHCEWC

SEQ ID NO: 138200 - protein, 9 aa, Homo sapiens
VRKHCEWCR

SEQ ID NO: 138201 - protein, 9 aa, Homo sapiens
RKHCEWCRA

SEQ ID NO: 138202 - protein, 9 aa, Homo sapiens
KHCEWCRAL

SEQ ID NO: 138203 - protein, 9 aa, Homo sapiens
HCEWCRALI

SEQ ID NO: 138204 - protein, 9 aa, Homo sapiens
CEWCRALIC

SEQ ID NO: 138205 - protein, 9 aa, Homo sapiens
EWCRALICR

SEQ ID NO: 138206 - protein, 9 aa, Homo sapiens
WCRALICRH

SEQ ID NO: 138207 - protein, 9 aa, Homo sapiens
CRALICRHE

SEQ ID NO: 138208 - protein, 9 aa, Homo sapiens
RALICRHEK

SEQ ID NO: 138209 - protein, 9 aa, Homo sapiens
ALICRHEKP

SEQ ID NO: 138210 - protein, 9 aa, Homo sapiens
LICRHEKPS

SEQ ID NO: 138211 - protein, 9 aa, Homo sapiens
ICRHEKPSA

SEQ ID NO: 138212 - protein, 9 aa, Homo sapiens
CRHEKPSAL

SEQ ID NO: 138213 - protein, 9 aa, Homo sapiens
RHEKPSALL

SEQ ID NO: 138214 - protein, 9 aa, Homo sapiens
HEKPSALLK

SEQ ID NO: 138215 - protein, 9 aa, Homo sapiens
EKPSALLKG

SEQ ID NO: 138216 - protein, 9 aa, Homo sapiens
KPSALLKGR

SEQ ID NO: 138217 - protein, 9 aa, Homo sapiens
PSALLKGRT

SEQ ID NO: 138218 - protein, 9 aa, Homo sapiens
SALLKGRTA

SEQ ID NO: 138219 - protein, 9 aa, Homo sapiens
ALLKGRTAC

SEQ ID NO: 138220 - protein, 9 aa, Homo sapiens
LLKGRTACC

SEQ ID NO: 138221 - protein, 9 aa, Homo sapiens
LKGRTACCH

SEQ ID NO: 138222 - protein, 9 aa, Homo sapiens
KGRTACCHS

SEQ ID NO: 138223 - protein, 9 aa, Homo sapiens
GRTACCHSE

SEQ ID NO: 138224 - protein, 9 aa, Homo sapiens
RTACCHSET

SEQ ID NO: 138225 - protein, 9 aa, Homo sapiens
TACCHSETV

SEQ ID NO: 138226 - protein, 9 aa, Homo sapiens
ACCHSETVV

SEQ ID NO: 138227 - protein, 9 aa, Homo sapiens
MHVRSLRAA

SEQ ID NO: 138228 - protein, 9 aa, Homo sapiens
HVRSLRAAA

SEQ ID NO: 138229 - protein, 9 aa, Homo sapiens
VRSLRAAAP

SEQ ID NO: 138230 - protein, 9 aa, Homo sapiens
RSLRAAAPH

SEQ ID NO: 138231 - protein, 9 aa, Homo sapiens
SLRAAAPHS

SEQ ID NO: 138232 - protein, 9 aa, Homo sapiens
LRAAAPHSF

SEQ ID NO: 138233 - protein, 9 aa, Homo sapiens
RAAAPHSFV

SEQ ID NO: 138234 - protein, 9 aa, Homo sapiens
AAAPHSFVA

SEQ ID NO: 138235 - protein, 9 aa, Homo sapiens
AAPHSFVAL

SEQ ID NO: 138236 - protein, 9 aa, Homo sapiens
APHSFVALW

SEQ ID NO: 138237 - protein, 9 aa, Homo sapiens
PHSFVALWA

SEQ ID NO: 138238 - protein, 9 aa, Homo sapiens
HSFVALWAP

SEQ ID NO: 138239 - protein, 9 aa, Homo sapiens
SFVALWAPL

SEQ ID NO: 138240 - protein, 9 aa, Homo sapiens
FVALWAPLF

SEQ ID NO: 138241 - protein, 9 aa, Homo sapiens
VALWAPLFL

SEQ ID NO: 138242 - protein, 9 aa, Homo sapiens
ALWAPLFLL

SEQ ID NO: 138243 - protein, 9 aa, Homo sapiens
LWAPLFLLR

SEQ ID NO: 138244 - protein, 9 aa, Homo sapiens
WAPLFLLRS

SEQ ID NO: 138245 - protein, 9 aa, Homo sapiens
APLFLLRSA

SEQ ID NO: 138246 - protein, 9 aa, Homo sapiens
PLFLLRSAL

SEQ ID NO: 138247 - protein, 9 aa, Homo sapiens
LFLLRSALA

SEQ ID NO: 138248 - protein, 9 aa, Homo sapiens
FLLRSALAD

SEQ ID NO: 138249 - protein, 9 aa, Homo sapiens
LLRSALADF

SEQ ID NO: 138250 - protein, 9 aa, Homo sapiens
LRSALADFS

SEQ ID NO: 138251 - protein, 9 aa, Homo sapiens
RSALADFSL

SEQ ID NO: 138252 - protein, 9 aa, Homo sapiens
SALADFSLD

SEQ ID NO: 138253 - protein, 9 aa, Homo sapiens
ALADFSLDN

SEQ ID NO: 138254 - protein, 9 aa, Homo sapiens
LADFSLDNE

SEQ ID NO: 138255 - protein, 9 aa, Homo sapiens
ADFSLDNEV

SEQ ID NO: 138256 - protein, 9 aa, Homo sapiens
DFSLDNEVH

SEQ ID NO: 138257 - protein, 9 aa, Homo sapiens
FSLDNEVHS

SEQ ID NO: 138258 - protein, 9 aa, Homo sapiens
SLDNEVHSS

SEQ ID NO: 138259 - protein, 9 aa, Homo sapiens
LDNEVHSSF

SEQ ID NO: 138260 - protein, 9 aa, Homo sapiens
DNEVHSSFI

SEQ ID NO: 138261 - protein, 9 aa, Homo sapiens
NEVHSSFIH

SEQ ID NO: 138262 - protein, 9 aa, Homo sapiens
EVHSSFIHR

SEQ ID NO: 138263 - protein, 9 aa, Homo sapiens
VHSSFIHRR

SEQ ID NO: 138264 - protein, 9 aa, Homo sapiens
HSSFIHRRL

SEQ ID NO: 138265 - protein, 9 aa, Homo sapiens
SSFIHRRLR

SEQ ID NO: 138266 - protein, 9 aa, Homo sapiens
SFIHRRLRS

SEQ ID NO: 138267 - protein, 9 aa, Homo sapiens
FIHRRLRSQ

SEQ ID NO: 138268 - protein, 9 aa, Homo sapiens
IHRRLRSQE

SEQ ID NO: 138269 - protein, 9 aa, Homo sapiens
HRRLRSQER

SEQ ID NO: 138270 - protein, 9 aa, Homo sapiens
RRLRSQERR

SEQ ID NO: 138271 - protein, 9 aa, Homo sapiens
RLRSQERRE

SEQ ID NO: 138272 - protein, 9 aa, Homo sapiens
LRSQERREM

SEQ ID NO: 138273 - protein, 9 aa, Homo sapiens
RSQERREMQ

SEQ ID NO: 138274 - protein, 9 aa, Homo sapiens
SQERREMQR

SEQ ID NO: 138275 - protein, 9 aa, Homo sapiens
QERREMQRE

SEQ ID NO: 138276 - protein, 9 aa, Homo sapiens
ERREMQREI

SEQ ID NO: 138277 - protein, 9 aa, Homo sapiens
RREMQREIL

SEQ ID NO: 138278 - protein, 9 aa, Homo sapiens
REMQREILS

SEQ ID NO: 138279 - protein, 9 aa, Homo sapiens
EMQREILSI

SEQ ID NO: 138280 - protein, 9 aa, Homo sapiens
MQREILSIL

SEQ ID NO: 138281 - protein, 9 aa, Homo sapiens
QREILSILG

SEQ ID NO: 138282 - protein, 9 aa, Homo sapiens
REILSILGL

SEQ ID NO: 138283 - protein, 9 aa, Homo sapiens
EILSILGLP

SEQ ID NO: 138284 - protein, 9 aa, Homo sapiens
ILSILGLPH

SEQ ID NO: 138285 - protein, 9 aa, Homo sapiens
LSILGLPHR

SEQ ID NO: 138286 - protein, 9 aa, Homo sapiens
SILGLPHRP

SEQ ID NO: 138287 - protein, 9 aa, Homo sapiens
ILGLPHRPR

SEQ ID NO: 138288 - protein, 9 aa, Homo sapiens
LGLPHRPRP

SEQ ID NO: 138289 - protein, 9 aa, Homo sapiens
GLPHRPRPH

SEQ ID NO: 138290 - protein, 9 aa, Homo sapiens
LPHRPRPHL

SEQ ID NO: 138291 - protein, 9 aa, Homo sapiens
PHRPRPHLQ

SEQ ID NO: 138292 - protein, 9 aa, Homo sapiens
HRPRPHLQG

SEQ ID NO: 138293 - protein, 9 aa, Homo sapiens
RPRPHLQGK

SEQ ID NO: 138294 - protein, 9 aa, Homo sapiens
PRPHLQGKH

SEQ ID NO: 138295 - protein, 9 aa, Homo sapiens
RPHLQGKHN

SEQ ID NO: 138296 - protein, 9 aa, Homo sapiens
PHLQGKHNS

SEQ ID NO: 138297 - protein, 9 aa, Homo sapiens
HLQGKHNSA

SEQ ID NO: 138298 - protein, 9 aa, Homo sapiens
LQGKHNSAP

SEQ ID NO: 138299 - protein, 9 aa, Homo sapiens
QGKHNSAPM

SEQ ID NO: 138300 - protein, 9 aa, Homo sapiens
GKHNSAPMF

SEQ ID NO: 138301 - protein, 9 aa, Homo sapiens
KHNSAPMFM

SEQ ID NO: 138302 - protein, 9 aa, Homo sapiens
HNSAPMFML

SEQ ID NO: 138303 - protein, 9 aa, Homo sapiens
NSAPMFMLD

SEQ ID NO: 138304 - protein, 9 aa, Homo sapiens
SAPMFMLDL

SEQ ID NO: 138305 - protein, 9 aa, Homo sapiens
APMFMLDLY

SEQ ID NO: 138306 - protein, 9 aa, Homo sapiens
PMFMLDLYN

SEQ ID NO: 138307 - protein, 9 aa, Homo sapiens
MFMLDLYNA

SEQ ID NO: 138308 - protein, 9 aa, Homo sapiens
FMLDLYNAM

SEQ ID NO: 138309 - protein, 9 aa, Homo sapiens
MLDLYNAMA

SEQ ID NO: 138310 - protein, 9 aa, Homo sapiens
LDLYNAMAV

SEQ ID NO: 138311 - protein, 9 aa, Homo sapiens
DLYNAMAVE

SEQ ID NO: 138312 - protein, 9 aa, Homo sapiens
LYNAMAVEE

SEQ ID NO: 138313 - protein, 9 aa, Homo sapiens
YNAMAVEEG

SEQ ID NO: 138314 - protein, 9 aa, Homo sapiens
NAMAVEEGG

SEQ ID NO: 138315 - protein, 9 aa, Homo sapiens
AMAVEEGGG

SEQ ID NO: 138316 - protein, 9 aa, Homo sapiens
MAVEEGGGP

SEQ ID NO: 138317 - protein, 9 aa, Homo sapiens
AVEEGGGPG

SEQ ID NO: 138318 - protein, 9 aa, Homo sapiens
VEEGGGPGG

SEQ ID NO: 138319 - protein, 9 aa, Homo sapiens
EEGGGPGGQ

SEQ ID NO: 138320 - protein, 9 aa, Homo sapiens
EGGGPGGQG

SEQ ID NO: 138321 - protein, 9 aa, Homo sapiens
GGGPGGQGF

SEQ ID NO: 138322 - protein, 9 aa, Homo sapiens
GGPGGQGFS

SEQ ID NO: 138323 - protein, 9 aa, Homo sapiens
GPGGQGFSY

SEQ ID NO: 138324 - protein, 9 aa, Homo sapiens
PGGQGFSYP

SEQ ID NO: 138325 - protein, 9 aa, Homo sapiens
GGQGFSYPY

SEQ ID NO: 138326 - protein, 9 aa, Homo sapiens
GQGFSYPYK

SEQ ID NO: 138327 - protein, 9 aa, Homo sapiens
QGFSYPYKA

SEQ ID NO: 138328 - protein, 9 aa, Homo sapiens
GFSYPYKAV

SEQ ID NO: 138329 - protein, 9 aa, Homo sapiens
FSYPYKAVF

SEQ ID NO: 138330 - protein, 9 aa, Homo sapiens
SYPYKAVFS

SEQ ID NO: 138331 - protein, 9 aa, Homo sapiens
YPYKAVFST

SEQ ID NO: 138332 - protein, 9 aa, Homo sapiens
PYKAVFSTQ

SEQ ID NO: 138333 - protein, 9 aa, Homo sapiens
YKAVFSTQG

SEQ ID NO: 138334 - protein, 9 aa, Homo sapiens
KAVFSTQGP

SEQ ID NO: 138335 - protein, 9 aa, Homo sapiens
AVFSTQGPP

SEQ ID NO: 138336 - protein, 9 aa, Homo sapiens
VFSTQGPPL

SEQ ID NO: 138337 - protein, 9 aa, Homo sapiens
FSTQGPPLA

SEQ ID NO: 138338 - protein, 9 aa, Homo sapiens
STQGPPLAS

SEQ ID NO: 138339 - protein, 9 aa, Homo sapiens
TQGPPLASL

SEQ ID NO: 138340 - protein, 9 aa, Homo sapiens
QGPPLASLQ

SEQ ID NO: 138341 - protein, 9 aa, Homo sapiens
GPPLASLQD

SEQ ID NO: 138342 - protein, 9 aa, Homo sapiens
PPLASLQDS

SEQ ID NO: 138343 - protein, 9 aa, Homo sapiens
PLASLQDSH

SEQ ID NO: 138344 - protein, 9 aa, Homo sapiens
LASLQDSHF

SEQ ID NO: 138345 - protein, 9 aa, Homo sapiens
ASLQDSHFL

SEQ ID NO: 138346 - protein, 9 aa, Homo sapiens
SLQDSHFLT

SEQ ID NO: 138347 - protein, 9 aa, Homo sapiens
LQDSHFLTD

SEQ ID NO: 138348 - protein, 9 aa, Homo sapiens
QDSHFLTDA

SEQ ID NO: 138349 - protein, 9 aa, Homo sapiens
DSHFLTDAD

SEQ ID NO: 138350 - protein, 9 aa, Homo sapiens
SHFLTDADM

SEQ ID NO: 138351 - protein, 9 aa, Homo sapiens
HFLTDADMV

SEQ ID NO: 138352 - protein, 9 aa, Homo sapiens
FLTDADMVM

SEQ ID NO: 138353 - protein, 9 aa, Homo sapiens
LTDADMVMS

SEQ ID NO: 138354 - protein, 9 aa, Homo sapiens
TDADMVMSF

SEQ ID NO: 138355 - protein, 9 aa, Homo sapiens
DADMVMSFV

SEQ ID NO: 138356 - protein, 9 aa, Homo sapiens
ADMVMSFVN

SEQ ID NO: 138357 - protein, 9 aa, Homo sapiens
DMVMSFVNL

SEQ ID NO: 138358 - protein, 9 aa, Homo sapiens
MVMSFVNLV

SEQ ID NO: 138359 - protein, 9 aa, Homo sapiens
VMSFVNLVE

SEQ ID NO: 138360 - protein, 9 aa, Homo sapiens
MSFVNLVEH

SEQ ID NO: 138361 - protein, 9 aa, Homo sapiens
SFVNLVEHD

SEQ ID NO: 138362 - protein, 9 aa, Homo sapiens
FVNLVEHDK

SEQ ID NO: 138363 - protein, 9 aa, Homo sapiens
VNLVEHDKE

SEQ ID NO: 138364 - protein, 9 aa, Homo sapiens
NLVEHDKEF

SEQ ID NO: 138365 - protein, 9 aa, Homo sapiens
LVEHDKEFF

SEQ ID NO: 138366 - protein, 9 aa, Homo sapiens
VEHDKEFFH

SEQ ID NO: 138367 - protein, 9 aa, Homo sapiens
EHDKEFFHP

SEQ ID NO: 138368 - protein, 9 aa, Homo sapiens
HDKEFFHPR

SEQ ID NO: 138369 - protein, 9 aa, Homo sapiens
DKEFFHPRY

SEQ ID NO: 138370 - protein, 9 aa, Homo sapiens
KEFFHPRYH

SEQ ID NO: 138371 - protein, 9 aa, Homo sapiens
EFFHPRYHH

SEQ ID NO: 138372 - protein, 9 aa, Homo sapiens
FFHPRYHHR

SEQ ID NO: 138373 - protein, 9 aa, Homo sapiens
FHPRYHHRE

SEQ ID NO: 138374 - protein, 9 aa, Homo sapiens
HPRYHHREF

SEQ ID NO: 138375 - protein, 9 aa, Homo sapiens
PRYHHREFR

SEQ ID NO: 138376 - protein, 9 aa, Homo sapiens
RYHHREFRF

SEQ ID NO: 138377 - protein, 9 aa, Homo sapiens
YHHREFRFD

SEQ ID NO: 138378 - protein, 9 aa, Homo sapiens
HHREFRFDL

SEQ ID NO: 138379 - protein, 9 aa, Homo sapiens
HREFRFDLS

SEQ ID NO: 138380 - protein, 9 aa, Homo sapiens
REFRFDLSK

SEQ ID NO: 138381 - protein, 9 aa, Homo sapiens
EFRFDLSKI

SEQ ID NO: 138382 - protein, 9 aa, Homo sapiens
FRFDLSKIP

SEQ ID NO: 138383 - protein, 9 aa, Homo sapiens
RFDLSKIPE

SEQ ID NO: 138384 - protein, 9 aa, Homo sapiens
FDLSKIPEG

SEQ ID NO: 138385 - protein, 9 aa, Homo sapiens
DLSKIPEGE

SEQ ID NO: 138386 - protein, 9 aa, Homo sapiens
LSKIPEGEA

SEQ ID NO: 138387 - protein, 9 aa, Homo sapiens
SKIPEGEAV

SEQ ID NO: 138388 - protein, 9 aa, Homo sapiens
KIPEGEAVT

SEQ ID NO: 138389 - protein, 9 aa, Homo sapiens
IPEGEAVTA

SEQ ID NO: 138390 - protein, 9 aa, Homo sapiens
PEGEAVTAA

SEQ ID NO: 138391 - protein, 9 aa, Homo sapiens
EGEAVTAAE

SEQ ID NO: 138392 - protein, 9 aa, Homo sapiens
GEAVTAAEF

SEQ ID NO: 138393 - protein, 9 aa, Homo sapiens
EAVTAAEFR

SEQ ID NO: 138394 - protein, 9 aa, Homo sapiens
AVTAAEFRI

SEQ ID NO: 138395 - protein, 9 aa, Homo sapiens
VTAAEFRIY

SEQ ID NO: 138396 - protein, 9 aa, Homo sapiens
TAAEFRIYK

SEQ ID NO: 138397 - protein, 9 aa, Homo sapiens
AAEFRIYKD

SEQ ID NO: 138398 - protein, 9 aa, Homo sapiens
AEFRIYKDY

SEQ ID NO: 138399 - protein, 9 aa, Homo sapiens
EFRIYKDYI

SEQ ID NO: 138400 - protein, 9 aa, Homo sapiens
FRIYKDYIR

SEQ ID NO: 138401 - protein, 9 aa, Homo sapiens
RIYKDYIRE

SEQ ID NO: 138402 - protein, 9 aa, Homo sapiens
IYKDYIRER

SEQ ID NO: 138403 - protein, 9 aa, Homo sapiens
YKDYIRERF

SEQ ID NO: 138404 - protein, 9 aa, Homo sapiens
KDYIRERFD

SEQ ID NO: 138405 - protein, 9 aa, Homo sapiens
DYIRERFDN

SEQ ID NO: 138406 - protein, 9 aa, Homo sapiens
YIRERFDNE

SEQ ID NO: 138407 - protein, 9 aa, Homo sapiens
IRERFDNET

SEQ ID NO: 138408 - protein, 9 aa, Homo sapiens
RERFDNETF

SEQ ID NO: 138409 - protein, 9 aa, Homo sapiens
ERFDNETFR

SEQ ID NO: 138410 - protein, 9 aa, Homo sapiens
RFDNETFRI

SEQ ID NO: 138411 - protein, 9 aa, Homo sapiens
FDNETFRIS

SEQ ID NO: 138412 - protein, 9 aa, Homo sapiens
DNETFRISV

SEQ ID NO: 138413 - protein, 9 aa, Homo sapiens
NETFRISVY

SEQ ID NO: 138414 - protein, 9 aa, Homo sapiens
ETFRISVYQ

SEQ ID NO: 138415 - protein, 9 aa, Homo sapiens
TFRISVYQV

SEQ ID NO: 138416 - protein, 9 aa, Homo sapiens
FRISVYQVL

SEQ ID NO: 138417 - protein, 9 aa, Homo sapiens
RISVYQVLQ

SEQ ID NO: 138418 - protein, 9 aa, Homo sapiens
ISVYQVLQE

SEQ ID NO: 138419 - protein, 9 aa, Homo sapiens
SVYQVLQEH

SEQ ID NO: 138420 - protein, 9 aa, Homo sapiens
VYQVLQEHL

SEQ ID NO: 138421 - protein, 9 aa, Homo sapiens
YQVLQEHLG

SEQ ID NO: 138422 - protein, 9 aa, Homo sapiens
QVLQEHLGR

SEQ ID NO: 138423 - protein, 9 aa, Homo sapiens
VLQEHLGRE

SEQ ID NO: 138424 - protein, 9 aa, Homo sapiens
LQEHLGRES

SEQ ID NO: 138425 - protein, 9 aa, Homo sapiens
QEHLGRESD

SEQ ID NO: 138426 - protein, 9 aa, Homo sapiens
EHLGRESDL

SEQ ID NO: 138427 - protein, 9 aa, Homo sapiens
HLGRESDLF

SEQ ID NO: 138428 - protein, 9 aa, Homo sapiens
LGRESDLFL

SEQ ID NO: 138429 - protein, 9 aa, Homo sapiens
GRESDLFLL

SEQ ID NO: 138430 - protein, 9 aa, Homo sapiens
RESDLFLLD

SEQ ID NO: 138431 - protein, 9 aa, Homo sapiens
ESDLFLLDS

SEQ ID NO: 138432 - protein, 9 aa, Homo sapiens
SDLFLLDSR

SEQ ID NO: 138433 - protein, 9 aa, Homo sapiens
DLFLLDSRT

SEQ ID NO: 138434 - protein, 9 aa, Homo sapiens
LFLLDSRTL

SEQ ID NO: 138435 - protein, 9 aa, Homo sapiens
FLLDSRTLW

SEQ ID NO: 138436 - protein, 9 aa, Homo sapiens
LLDSRTLWA

SEQ ID NO: 138437 - protein, 9 aa, Homo sapiens
LDSRTLWAS

SEQ ID NO: 138438 - protein, 9 aa, Homo sapiens
DSRTLWASE

SEQ ID NO: 138439 - protein, 9 aa, Homo sapiens
SRTLWASEE

SEQ ID NO: 138440 - protein, 9 aa, Homo sapiens
RTLWASEEG

SEQ ID NO: 138441 - protein, 9 aa, Homo sapiens
TLWASEEGW

SEQ ID NO: 138442 - protein, 9 aa, Homo sapiens
LWASEEGWL

SEQ ID NO: 138443 - protein, 9 aa, Homo sapiens
WASEEGWLV

SEQ ID NO: 138444 - protein, 9 aa, Homo sapiens
ASEEGWLVF

SEQ ID NO: 138445 - protein, 9 aa, Homo sapiens
SEEGWLVFD

SEQ ID NO: 138446 - protein, 9 aa, Homo sapiens
EEGWLVFDI

SEQ ID NO: 138447 - protein, 9 aa, Homo sapiens
EGWLVFDIT

SEQ ID NO: 138448 - protein, 9 aa, Homo sapiens
GWLVFDITA

SEQ ID NO: 138449 - protein, 9 aa, Homo sapiens
WLVFDITAT

SEQ ID NO: 138450 - protein, 9 aa, Homo sapiens
LVFDITATS

SEQ ID NO: 138451 - protein, 9 aa, Homo sapiens
VFDITATSN

SEQ ID NO: 138452 - protein, 9 aa, Homo sapiens
FDITATSNH

SEQ ID NO: 138453 - protein, 9 aa, Homo sapiens
DITATSNHW

SEQ ID NO: 138454 - protein, 9 aa, Homo sapiens
ITATSNHWV

SEQ ID NO: 138455 - protein, 9 aa, Homo sapiens
TATSNHWVV

SEQ ID NO: 138456 - protein, 9 aa, Homo sapiens
ATSNHWVVN

SEQ ID NO: 138457 - protein, 9 aa, Homo sapiens
TSNHWVVNP

SEQ ID NO: 138458 - protein, 9 aa, Homo sapiens
SNHWVVNPR

SEQ ID NO: 138459 - protein, 9 aa, Homo sapiens
NHWVVNPRH

SEQ ID NO: 138460 - protein, 9 aa, Homo sapiens
HWVVNPRHN

SEQ ID NO: 138461 - protein, 9 aa, Homo sapiens
WVVNPRHNL

SEQ ID NO: 138462 - protein, 9 aa, Homo sapiens
VVNPRHNLG

SEQ ID NO: 138463 - protein, 9 aa, Homo sapiens
VNPRHNLGL

SEQ ID NO: 138464 - protein, 9 aa, Homo sapiens
NPRHNLGLQ

SEQ ID NO: 138465 - protein, 9 aa, Homo sapiens
PRHNLGLQL

SEQ ID NO: 138466 - protein, 9 aa, Homo sapiens
RHNLGLQLS

SEQ ID NO: 138467 - protein, 9 aa, Homo sapiens
HNLGLQLSV

SEQ ID NO: 138468 - protein, 9 aa, Homo sapiens
NLGLQLSVE

SEQ ID NO: 138469 - protein, 9 aa, Homo sapiens
LGLQLSVET

SEQ ID NO: 138470 - protein, 9 aa, Homo sapiens
GLQLSVETL

SEQ ID NO: 138471 - protein, 9 aa, Homo sapiens
LQLSVETLD

SEQ ID NO: 138472 - protein, 9 aa, Homo sapiens
QLSVETLDG

SEQ ID NO: 138473 - protein, 9 aa, Homo sapiens
LSVETLDGQ

SEQ ID NO: 138474 - protein, 9 aa, Homo sapiens
SVETLDGQS

SEQ ID NO: 138475 - protein, 9 aa, Homo sapiens
VETLDGQSI

SEQ ID NO: 138476 - protein, 9 aa, Homo sapiens
ETLDGQSIN

SEQ ID NO: 138477 - protein, 9 aa, Homo sapiens
TLDGQSINP

SEQ ID NO: 138478 - protein, 9 aa, Homo sapiens
LDGQSINPK

SEQ ID NO: 138479 - protein, 9 aa, Homo sapiens
DGQSINPKL

SEQ ID NO: 138480 - protein, 9 aa, Homo sapiens
GQSINPKLA

SEQ ID NO: 138481 - protein, 9 aa, Homo sapiens
QSINPKLAG

SEQ ID NO: 138482 - protein, 9 aa, Homo sapiens
SINPKLAGL

SEQ ID NO: 138483 - protein, 9 aa, Homo sapiens
INPKLAGLI

SEQ ID NO: 138484 - protein, 9 aa, Homo sapiens
NPKLAGLIG

SEQ ID NO: 138485 - protein, 9 aa, Homo sapiens
PKLAGLIGR

SEQ ID NO: 138486 - protein, 9 aa, Homo sapiens
KLAGLIGRH

SEQ ID NO: 138487 - protein, 9 aa, Homo sapiens
LAGLIGRHG

SEQ ID NO: 138488 - protein, 9 aa, Homo sapiens
AGLIGRHGP

SEQ ID NO: 138489 - protein, 9 aa, Homo sapiens
GLIGRHGPQ

SEQ ID NO: 138490 - protein, 9 aa, Homo sapiens
LIGRHGPQN

SEQ ID NO: 138491 - protein, 9 aa, Homo sapiens
IGRHGPQNK

SEQ ID NO: 138492 - protein, 9 aa, Homo sapiens
GRHGPQNKQ

SEQ ID NO: 138493 - protein, 9 aa, Homo sapiens
RHGPQNKQP

SEQ ID NO: 138494 - protein, 9 aa, Homo sapiens
HGPQNKQPF

SEQ ID NO: 138495 - protein, 9 aa, Homo sapiens
GPQNKQPFM

SEQ ID NO: 138496 - protein, 9 aa, Homo sapiens
PQNKQPFMV

SEQ ID NO: 138497 - protein, 9 aa, Homo sapiens
QNKQPFMVA

SEQ ID NO: 138498 - protein, 9 aa, Homo sapiens
NKQPFMVAF

SEQ ID NO: 138499 - protein, 9 aa, Homo sapiens
KQPFMVAFF

SEQ ID NO: 138500 - protein, 9 aa, Homo sapiens
QPFMVAFFK

SEQ ID NO: 138501 - protein, 9 aa, Homo sapiens
PFMVAFFKA

SEQ ID NO: 138502 - protein, 9 aa, Homo sapiens
FMVAFFKAT

SEQ ID NO: 138503 - protein, 9 aa, Homo sapiens
MVAFFKATE

SEQ ID NO: 138504 - protein, 9 aa, Homo sapiens
VAFFKATEV

SEQ ID NO: 138505 - protein, 9 aa, Homo sapiens
AFFKATEVH

SEQ ID NO: 138506 - protein, 9 aa, Homo sapiens
FFKATEVHF

SEQ ID NO: 138507 - protein, 9 aa, Homo sapiens
FKATEVHFR

SEQ ID NO: 138508 - protein, 9 aa, Homo sapiens
KATEVHFRS

SEQ ID NO: 138509 - protein, 9 aa, Homo sapiens
ATEVHFRSI

SEQ ID NO: 138510 - protein, 9 aa, Homo sapiens
TEVHFRSIR

SEQ ID NO: 138511 - protein, 9 aa, Homo sapiens
EVHFRSIRS

SEQ ID NO: 138512 - protein, 9 aa, Homo sapiens
VHFRSIRST

SEQ ID NO: 138513 - protein, 9 aa, Homo sapiens
HFRSIRSTG

SEQ ID NO: 138514 - protein, 9 aa, Homo sapiens
FRSIRSTGS

SEQ ID NO: 138515 - protein, 9 aa, Homo sapiens
RSIRSTGSK

SEQ ID NO: 138516 - protein, 9 aa, Homo sapiens
SIRSTGSKQ

SEQ ID NO: 138517 - protein, 9 aa, Homo sapiens
IRSTGSKQR

SEQ ID NO: 138518 - protein, 9 aa, Homo sapiens
RSTGSKQRS

SEQ ID NO: 138519 - protein, 9 aa, Homo sapiens
STGSKQRSQ

SEQ ID NO: 138520 - protein, 9 aa, Homo sapiens
TGSKQRSQN

SEQ ID NO: 138521 - protein, 9 aa, Homo sapiens
GSKQRSQNR

SEQ ID NO: 138522 - protein, 9 aa, Homo sapiens
SKQRSQNRS

SEQ ID NO: 138523 - protein, 9 aa, Homo sapiens
KQRSQNRSK

SEQ ID NO: 138524 - protein, 9 aa, Homo sapiens
QRSQNRSKT

SEQ ID NO: 138525 - protein, 9 aa, Homo sapiens
RSQNRSKTP

SEQ ID NO: 138526 - protein, 9 aa, Homo sapiens
SQNRSKTPK

SEQ ID NO: 138527 - protein, 9 aa, Homo sapiens
QNRSKTPKN

SEQ ID NO: 138528 - protein, 9 aa, Homo sapiens
NRSKTPKNQ

SEQ ID NO: 138529 - protein, 9 aa, Homo sapiens
RSKTPKNQE

SEQ ID NO: 138530 - protein, 9 aa, Homo sapiens
SKTPKNQEA

SEQ ID NO: 138531 - protein, 9 aa, Homo sapiens
KTPKNQEAL

SEQ ID NO: 138532 - protein, 9 aa, Homo sapiens
TPKNQEALR

SEQ ID NO: 138533 - protein, 9 aa, Homo sapiens
PKNQEALRM

SEQ ID NO: 138534 - protein, 9 aa, Homo sapiens
KNQEALRMA

SEQ ID NO: 138535 - protein, 9 aa, Homo sapiens
NQEALRMAN

SEQ ID NO: 138536 - protein, 9 aa, Homo sapiens
QEALRMANV

SEQ ID NO: 138537 - protein, 9 aa, Homo sapiens
EALRMANVA

SEQ ID NO: 138538 - protein, 9 aa, Homo sapiens
ALRMANVAE

SEQ ID NO: 138539 - protein, 9 aa, Homo sapiens
LRMANVAEN

SEQ ID NO: 138540 - protein, 9 aa, Homo sapiens
RMANVAENS

SEQ ID NO: 138541 - protein, 9 aa, Homo sapiens
MANVAENSS

SEQ ID NO: 138542 - protein, 9 aa, Homo sapiens
ANVAENSSS

SEQ ID NO: 138543 - protein, 9 aa, Homo sapiens
NVAENSSSD

SEQ ID NO: 138544 - protein, 9 aa, Homo sapiens
VAENSSSDQ

SEQ ID NO: 138545 - protein, 9 aa, Homo sapiens
AENSSSDQR

SEQ ID NO: 138546 - protein, 9 aa, Homo sapiens
ENSSSDQRQ

SEQ ID NO: 138547 - protein, 9 aa, Homo sapiens
NSSSDQRQA

SEQ ID NO: 138548 - protein, 9 aa, Homo sapiens
SSSDQRQAC

SEQ ID NO: 138549 - protein, 9 aa, Homo sapiens
SSDQRQACK

SEQ ID NO: 138550 - protein, 9 aa, Homo sapiens
SDQRQACKK

SEQ ID NO: 138551 - protein, 9 aa, Homo sapiens
DQRQACKKH

SEQ ID NO: 138552 - protein, 9 aa, Homo sapiens
QRQACKKHE

SEQ ID NO: 138553 - protein, 9 aa, Homo sapiens
RQACKKHEL

SEQ ID NO: 138554 - protein, 9 aa, Homo sapiens
QACKKHELY

SEQ ID NO: 138555 - protein, 9 aa, Homo sapiens
ACKKHELYV

SEQ ID NO: 138556 - protein, 9 aa, Homo sapiens
CKKHELYVS

SEQ ID NO: 138557 - protein, 9 aa, Homo sapiens
KKHELYVSF

SEQ ID NO: 138558 - protein, 9 aa, Homo sapiens
KHELYVSFR

SEQ ID NO: 138559 - protein, 9 aa, Homo sapiens
HELYVSFRD

SEQ ID NO: 138560 - protein, 9 aa, Homo sapiens
ELYVSFRDL

SEQ ID NO: 138561 - protein, 9 aa, Homo sapiens
LYVSFRDLG

SEQ ID NO: 138562 - protein, 9 aa, Homo sapiens
YVSFRDLGW

SEQ ID NO: 138563 - protein, 9 aa, Homo sapiens
VSFRDLGWQ

SEQ ID NO: 138564 - protein, 9 aa, Homo sapiens
SFRDLGWQD

SEQ ID NO: 138565 - protein, 9 aa, Homo sapiens
FRDLGWQDW

SEQ ID NO: 138566 - protein, 9 aa, Homo sapiens
RDLGWQDWI

SEQ ID NO: 138567 - protein, 9 aa, Homo sapiens
DLGWQDWII

SEQ ID NO: 138568 - protein, 9 aa, Homo sapiens
LGWQDWIIA

SEQ ID NO: 138569 - protein, 9 aa, Homo sapiens
GWQDWIIAP

SEQ ID NO: 138570 - protein, 9 aa, Homo sapiens
WQDWIIAPE

SEQ ID NO: 138571 - protein, 9 aa, Homo sapiens
QDWIIAPEG

SEQ ID NO: 138572 - protein, 9 aa, Homo sapiens
DWIIAPEGY

SEQ ID NO: 138573 - protein, 9 aa, Homo sapiens
WIIAPEGYA

SEQ ID NO: 138574 - protein, 9 aa, Homo sapiens
IIAPEGYAA

SEQ ID NO: 138575 - protein, 9 aa, Homo sapiens
IAPEGYAAY

SEQ ID NO: 138576 - protein, 9 aa, Homo sapiens
APEGYAAYY

SEQ ID NO: 138577 - protein, 9 aa, Homo sapiens
PEGYAAYYC

SEQ ID NO: 138578 - protein, 9 aa, Homo sapiens
EGYAAYYCE

SEQ ID NO: 138579 - protein, 9 aa, Homo sapiens
GYAAYYCEG

SEQ ID NO: 138580 - protein, 9 aa, Homo sapiens
YAAYYCEGE

SEQ ID NO: 138581 - protein, 9 aa, Homo sapiens
AAYYCEGEC

SEQ ID NO: 138582 - protein, 9 aa, Homo sapiens
AYYCEGECA

SEQ ID NO: 138583 - protein, 9 aa, Homo sapiens
YYCEGECAF

SEQ ID NO: 138584 - protein, 9 aa, Homo sapiens
YCEGECAFP

SEQ ID NO: 138585 - protein, 9 aa, Homo sapiens
CEGECAFPL

SEQ ID NO: 138586 - protein, 9 aa, Homo sapiens
EGECAFPLN

SEQ ID NO: 138587 - protein, 9 aa, Homo sapiens
GECAFPLNS

SEQ ID NO: 138588 - protein, 9 aa, Homo sapiens
ECAFPLNSY

SEQ ID NO: 138589 - protein, 9 aa, Homo sapiens
CAFPLNSYM

SEQ ID NO: 138590 - protein, 9 aa, Homo sapiens
AFPLNSYMN

SEQ ID NO: 138591 - protein, 9 aa, Homo sapiens
FPLNSYMNA

SEQ ID NO: 138592 - protein, 9 aa, Homo sapiens
PLNSYMNAT

SEQ ID NO: 138593 - protein, 9 aa, Homo sapiens
LNSYMNATN

SEQ ID NO: 138594 - protein, 9 aa, Homo sapiens
NSYMNATNH

SEQ ID NO: 138595 - protein, 9 aa, Homo sapiens
SYMNATNHA

SEQ ID NO: 138596 - protein, 9 aa, Homo sapiens
YMNATNHAI

SEQ ID NO: 138597 - protein, 9 aa, Homo sapiens
MNATNHAIV

SEQ ID NO: 138598 - protein, 9 aa, Homo sapiens
NATNHAIVQ

SEQ ID NO: 138599 - protein, 9 aa, Homo sapiens
ATNHAIVQT

SEQ ID NO: 138600 - protein, 9 aa, Homo sapiens
TNHAIVQTL

SEQ ID NO: 138601 - protein, 9 aa, Homo sapiens
NHAIVQTLV

SEQ ID NO: 138602 - protein, 9 aa, Homo sapiens
HAIVQTLVH

SEQ ID NO: 138603 - protein, 9 aa, Homo sapiens
AIVQTLVHF

SEQ ID NO: 138604 - protein, 9 aa, Homo sapiens
IVQTLVHFI

SEQ ID NO: 138605 - protein, 9 aa, Homo sapiens
VQTLVHFIN

SEQ ID NO: 138606 - protein, 9 aa, Homo sapiens
QTLVHFINP

SEQ ID NO: 138607 - protein, 9 aa, Homo sapiens
TLVHFINPE

SEQ ID NO: 138608 - protein, 9 aa, Homo sapiens
LVHFINPET

SEQ ID NO: 138609 - protein, 9 aa, Homo sapiens
VHFINPETV

SEQ ID NO: 138610 - protein, 9 aa, Homo sapiens
HFINPETVP

SEQ ID NO: 138611 - protein, 9 aa, Homo sapiens
FINPETVPK

SEQ ID NO: 138612 - protein, 9 aa, Homo sapiens
INPETVPKP

SEQ ID NO: 138613 - protein, 9 aa, Homo sapiens
NPETVPKPC

SEQ ID NO: 138614 - protein, 9 aa, Homo sapiens
PETVPKPCC

SEQ ID NO: 138615 - protein, 9 aa, Homo sapiens
ETVPKPCCA

SEQ ID NO: 138616 - protein, 9 aa, Homo sapiens
TVPKPCCAP

SEQ ID NO: 138617 - protein, 9 aa, Homo sapiens
VPKPCCAPT

SEQ ID NO: 138618 - protein, 9 aa, Homo sapiens
PKPCCAPTQ

SEQ ID NO: 138619 - protein, 9 aa, Homo sapiens
KPCCAPTQL

SEQ ID NO: 138620 - protein, 9 aa, Homo sapiens
PCCAPTQLN

SEQ ID NO: 138621 - protein, 9 aa, Homo sapiens
CCAPTQLNA

SEQ ID NO: 138622 - protein, 9 aa, Homo sapiens
CAPTQLNAI

SEQ ID NO: 138623 - protein, 9 aa, Homo sapiens
APTQLNAIS

SEQ ID NO: 138624 - protein, 9 aa, Homo sapiens
PTQLNAISV

SEQ ID NO: 138625 - protein, 9 aa, Homo sapiens
TQLNAISVL

SEQ ID NO: 138626 - protein, 9 aa, Homo sapiens
QLNAISVLY

SEQ ID NO: 138627 - protein, 9 aa, Homo sapiens
LNAISVLYF

SEQ ID NO: 138628 - protein, 9 aa, Homo sapiens
NAISVLYFD

SEQ ID NO: 138629 - protein, 9 aa, Homo sapiens
AISVLYFDD

SEQ ID NO: 138630 - protein, 9 aa, Homo sapiens
ISVLYFDDS

SEQ ID NO: 138631 - protein, 9 aa, Homo sapiens
SVLYFDDSS

SEQ ID NO: 138632 - protein, 9 aa, Homo sapiens
VLYFDDSSN

SEQ ID NO: 138633 - protein, 9 aa, Homo sapiens
LYFDDSSNV

SEQ ID NO: 138634 - protein, 9 aa, Homo sapiens
YFDDSSNVI

SEQ ID NO: 138635 - protein, 9 aa, Homo sapiens
FDDSSNVIL

SEQ ID NO: 138636 - protein, 9 aa, Homo sapiens
DDSSNVILK

SEQ ID NO: 138637 - protein, 9 aa, Homo sapiens
DSSNVILKK

SEQ ID NO: 138638 - protein, 9 aa, Homo sapiens
SSNVILKKY

SEQ ID NO: 138639 - protein, 9 aa, Homo sapiens
SNVILKKYR

SEQ ID NO: 138640 - protein, 9 aa, Homo sapiens
NVILKKYRN

SEQ ID NO: 138641 - protein, 9 aa, Homo sapiens
VILKKYRNM

SEQ ID NO: 138642 - protein, 9 aa, Homo sapiens
ILKKYRNMV

SEQ ID NO: 138643 - protein, 9 aa, Homo sapiens
LKKYRNMVV

SEQ ID NO: 138644 - protein, 9 aa, Homo sapiens
KKYRNMVVR

SEQ ID NO: 138645 - protein, 9 aa, Homo sapiens
KYRNMVVRA

SEQ ID NO: 138646 - protein, 9 aa, Homo sapiens
YRNMVVRAC

SEQ ID NO: 138647 - protein, 9 aa, Homo sapiens
RNMVVRACG

SEQ ID NO: 138648 - protein, 9 aa, Homo sapiens
NMVVRACGC

SEQ ID NO: 138649 - protein, 9 aa, Homo sapiens
MVVRACGCH

SEQ ID NO: 138650 - protein, 9 aa, Homo sapiens
MEVSPLQPV

SEQ ID NO: 138651 - protein, 9 aa, Homo sapiens
EVSPLQPVN

SEQ ID NO: 138652 - protein, 9 aa, Homo sapiens
VSPLQPVNE

SEQ ID NO: 138653 - protein, 9 aa, Homo sapiens
SPLQPVNEN

SEQ ID NO: 138654 - protein, 9 aa, Homo sapiens
PLQPVNENM

SEQ ID NO: 138655 - protein, 9 aa, Homo sapiens
LQPVNENMQ

SEQ ID NO: 138656 - protein, 9 aa, Homo sapiens
QPVNENMQV

SEQ ID NO: 138657 - protein, 9 aa, Homo sapiens
PVNENMQVN

SEQ ID NO: 138658 - protein, 9 aa, Homo sapiens
VNENMQVNK

SEQ ID NO: 138659 - protein, 9 aa, Homo sapiens
NENMQVNKI

SEQ ID NO: 138660 - protein, 9 aa, Homo sapiens
ENMQVNKIK

SEQ ID NO: 138661 - protein, 9 aa, Homo sapiens
NMQVNKIKK

SEQ ID NO: 138662 - protein, 9 aa, Homo sapiens
MQVNKIKKN

SEQ ID NO: 138663 - protein, 9 aa, Homo sapiens
QVNKIKKNE

SEQ ID NO: 138664 - protein, 9 aa, Homo sapiens
VNKIKKNED

SEQ ID NO: 138665 - protein, 9 aa, Homo sapiens
NKIKKNEDA

SEQ ID NO: 138666 - protein, 9 aa, Homo sapiens
KIKKNEDAK

SEQ ID NO: 138667 - protein, 9 aa, Homo sapiens
IKKNEDAKK

SEQ ID NO: 138668 - protein, 9 aa, Homo sapiens
KKNEDAKKR

SEQ ID NO: 138669 - protein, 9 aa, Homo sapiens
KNEDAKKRL

SEQ ID NO: 138670 - protein, 9 aa, Homo sapiens
NEDAKKRLS

SEQ ID NO: 138671 - protein, 9 aa, Homo sapiens
EDAKKRLSV

SEQ ID NO: 138672 - protein, 9 aa, Homo sapiens
DAKKRLSVE

SEQ ID NO: 138673 - protein, 9 aa, Homo sapiens
AKKRLSVER

SEQ ID NO: 138674 - protein, 9 aa, Homo sapiens
KKRLSVERI

SEQ ID NO: 138675 - protein, 9 aa, Homo sapiens
KRLSVERIY

SEQ ID NO: 138676 - protein, 9 aa, Homo sapiens
RLSVERIYQ

SEQ ID NO: 138677 - protein, 9 aa, Homo sapiens
LSVERIYQK

SEQ ID NO: 138678 - protein, 9 aa, Homo sapiens
SVERIYQKK

SEQ ID NO: 138679 - protein, 9 aa, Homo sapiens
VERIYQKKT

SEQ ID NO: 138680 - protein, 9 aa, Homo sapiens
ERIYQKKTQ

SEQ ID NO: 138681 - protein, 9 aa, Homo sapiens
RIYQKKTQL

SEQ ID NO: 138682 - protein, 9 aa, Homo sapiens
IYQKKTQLE

SEQ ID NO: 138683 - protein, 9 aa, Homo sapiens
YQKKTQLEH

SEQ ID NO: 138684 - protein, 9 aa, Homo sapiens
QKKTQLEHI

SEQ ID NO: 138685 - protein, 9 aa, Homo sapiens
KKTQLEHIL

SEQ ID NO: 138686 - protein, 9 aa, Homo sapiens
KTQLEHILL

SEQ ID NO: 138687 - protein, 9 aa, Homo sapiens
TQLEHILLR

SEQ ID NO: 138688 - protein, 9 aa, Homo sapiens
QLEHILLRP

SEQ ID NO: 138689 - protein, 9 aa, Homo sapiens
LEHILLRPD

SEQ ID NO: 138690 - protein, 9 aa, Homo sapiens
EHILLRPDT

SEQ ID NO: 138691 - protein, 9 aa, Homo sapiens
HILLRPDTY

SEQ ID NO: 138692 - protein, 9 aa, Homo sapiens
ILLRPDTYI

SEQ ID NO: 138693 - protein, 9 aa, Homo sapiens
LLRPDTYIG

SEQ ID NO: 138694 - protein, 9 aa, Homo sapiens
LRPDTYIGS

SEQ ID NO: 138695 - protein, 9 aa, Homo sapiens
RPDTYIGSV

SEQ ID NO: 138696 - protein, 9 aa, Homo sapiens
PDTYIGSVE

SEQ ID NO: 138697 - protein, 9 aa, Homo sapiens
DTYIGSVEL

SEQ ID NO: 138698 - protein, 9 aa, Homo sapiens
TYIGSVELV

SEQ ID NO: 138699 - protein, 9 aa, Homo sapiens
YIGSVELVT

SEQ ID NO: 138700 - protein, 9 aa, Homo sapiens
IGSVELVTQ

SEQ ID NO: 138701 - protein, 9 aa, Homo sapiens
GSVELVTQQ

SEQ ID NO: 138702 - protein, 9 aa, Homo sapiens
SVELVTQQM

SEQ ID NO: 138703 - protein, 9 aa, Homo sapiens
VELVTQQMW

SEQ ID NO: 138704 - protein, 9 aa, Homo sapiens
ELVTQQMWV

SEQ ID NO: 138705 - protein, 9 aa, Homo sapiens
LVTQQMWVY

SEQ ID NO: 138706 - protein, 9 aa, Homo sapiens
VTQQMWVYD

SEQ ID NO: 138707 - protein, 9 aa, Homo sapiens
TQQMWVYDE

SEQ ID NO: 138708 - protein, 9 aa, Homo sapiens
QQMWVYDED

SEQ ID NO: 138709 - protein, 9 aa, Homo sapiens
QMWVYDEDV

SEQ ID NO: 138710 - protein, 9 aa, Homo sapiens
MWVYDEDVG

SEQ ID NO: 138711 - protein, 9 aa, Homo sapiens
WVYDEDVGI

SEQ ID NO: 138712 - protein, 9 aa, Homo sapiens
VYDEDVGIN

SEQ ID NO: 138713 - protein, 9 aa, Homo sapiens
YDEDVGINY

SEQ ID NO: 138714 - protein, 9 aa, Homo sapiens
DEDVGINYR

SEQ ID NO: 138715 - protein, 9 aa, Homo sapiens
EDVGINYRE

SEQ ID NO: 138716 - protein, 9 aa, Homo sapiens
DVGINYREV

SEQ ID NO: 138717 - protein, 9 aa, Homo sapiens
VGINYREVT

SEQ ID NO: 138718 - protein, 9 aa, Homo sapiens
GINYREVTF

SEQ ID NO: 138719 - protein, 9 aa, Homo sapiens
INYREVTFV

SEQ ID NO: 138720 - protein, 9 aa, Homo sapiens
NYREVTFVP

SEQ ID NO: 138721 - protein, 9 aa, Homo sapiens
YREVTFVPG

SEQ ID NO: 138722 - protein, 9 aa, Homo sapiens
REVTFVPGL

SEQ ID NO: 138723 - protein, 9 aa, Homo sapiens
EVTFVPGLY

SEQ ID NO: 138724 - protein, 9 aa, Homo sapiens
VTFVPGLYK

SEQ ID NO: 138725 - protein, 9 aa, Homo sapiens
TFVPGLYKI

SEQ ID NO: 138726 - protein, 9 aa, Homo sapiens
FVPGLYKIF

SEQ ID NO: 138727 - protein, 9 aa, Homo sapiens
VPGLYKIFD

SEQ ID NO: 138728 - protein, 9 aa, Homo sapiens
PGLYKIFDE

SEQ ID NO: 138729 - protein, 9 aa, Homo sapiens
GLYKIFDEI

SEQ ID NO: 138730 - protein, 9 aa, Homo sapiens
LYKIFDEIL

SEQ ID NO: 138731 - protein, 9 aa, Homo sapiens
YKIFDEILV

SEQ ID NO: 138732 - protein, 9 aa, Homo sapiens
KIFDEILVN

SEQ ID NO: 138733 - protein, 9 aa, Homo sapiens
IFDEILVNA

SEQ ID NO: 138734 - protein, 9 aa, Homo sapiens
FDEILVNAA

SEQ ID NO: 138735 - protein, 9 aa, Homo sapiens
DEILVNAAD

SEQ ID NO: 138736 - protein, 9 aa, Homo sapiens
EILVNAADN

SEQ ID NO: 138737 - protein, 9 aa, Homo sapiens
ILVNAADNK

SEQ ID NO: 138738 - protein, 9 aa, Homo sapiens
LVNAADNKQ

SEQ ID NO: 138739 - protein, 9 aa, Homo sapiens
VNAADNKQR

SEQ ID NO: 138740 - protein, 9 aa, Homo sapiens
NAADNKQRD

SEQ ID NO: 138741 - protein, 9 aa, Homo sapiens
AADNKQRDP

SEQ ID NO: 138742 - protein, 9 aa, Homo sapiens
ADNKQRDPK

SEQ ID NO: 138743 - protein, 9 aa, Homo sapiens
DNKQRDPKM

SEQ ID NO: 138744 - protein, 9 aa, Homo sapiens
NKQRDPKMS

SEQ ID NO: 138745 - protein, 9 aa, Homo sapiens
KQRDPKMSC

SEQ ID NO: 138746 - protein, 9 aa, Homo sapiens
QRDPKMSCI

SEQ ID NO: 138747 - protein, 9 aa, Homo sapiens
RDPKMSCIR

SEQ ID NO: 138748 - protein, 9 aa, Homo sapiens
DPKMSCIRV

SEQ ID NO: 138749 - protein, 9 aa, Homo sapiens
PKMSCIRVT

SEQ ID NO: 138750 - protein, 9 aa, Homo sapiens
KMSCIRVTI

SEQ ID NO: 138751 - protein, 9 aa, Homo sapiens
MSCIRVTID

SEQ ID NO: 138752 - protein, 9 aa, Homo sapiens
SCIRVTIDP

SEQ ID NO: 138753 - protein, 9 aa, Homo sapiens
CIRVTIDPE

SEQ ID NO: 138754 - protein, 9 aa, Homo sapiens
IRVTIDPEN

SEQ ID NO: 138755 - protein, 9 aa, Homo sapiens
RVTIDPENN

SEQ ID NO: 138756 - protein, 9 aa, Homo sapiens
VTIDPENNL

SEQ ID NO: 138757 - protein, 9 aa, Homo sapiens
TIDPENNLI

SEQ ID NO: 138758 - protein, 9 aa, Homo sapiens
IDPENNLIS

SEQ ID NO: 138759 - protein, 9 aa, Homo sapiens
DPENNLISI

SEQ ID NO: 138760 - protein, 9 aa, Homo sapiens
PENNLISIW

SEQ ID NO: 138761 - protein, 9 aa, Homo sapiens
ENNLISIWN

SEQ ID NO: 138762 - protein, 9 aa, Homo sapiens
NNLISIWNN

SEQ ID NO: 138763 - protein, 9 aa, Homo sapiens
NLISIWNNG

SEQ ID NO: 138764 - protein, 9 aa, Homo sapiens
LISIWNNGK

SEQ ID NO: 138765 - protein, 9 aa, Homo sapiens
ISIWNNGKG

SEQ ID NO: 138766 - protein, 9 aa, Homo sapiens
SIWNNGKGI

SEQ ID NO: 138767 - protein, 9 aa, Homo sapiens
IWNNGKGIP

SEQ ID NO: 138768 - protein, 9 aa, Homo sapiens
WNNGKGIPV

SEQ ID NO: 138769 - protein, 9 aa, Homo sapiens
NNGKGIPVV

SEQ ID NO: 138770 - protein, 9 aa, Homo sapiens
NGKGIPVVE

SEQ ID NO: 138771 - protein, 9 aa, Homo sapiens
GKGIPVVEH

SEQ ID NO: 138772 - protein, 9 aa, Homo sapiens
KGIPVVEHK

SEQ ID NO: 138773 - protein, 9 aa, Homo sapiens
GIPVVEHKV

SEQ ID NO: 138774 - protein, 9 aa, Homo sapiens
IPVVEHKVE

SEQ ID NO: 138775 - protein, 9 aa, Homo sapiens
PVVEHKVEK

SEQ ID NO: 138776 - protein, 9 aa, Homo sapiens
VVEHKVEKM

SEQ ID NO: 138777 - protein, 9 aa, Homo sapiens
VEHKVEKMY

SEQ ID NO: 138778 - protein, 9 aa, Homo sapiens
EHKVEKMYV

SEQ ID NO: 138779 - protein, 9 aa, Homo sapiens
HKVEKMYVP

SEQ ID NO: 138780 - protein, 9 aa, Homo sapiens
KVEKMYVPA

SEQ ID NO: 138781 - protein, 9 aa, Homo sapiens
VEKMYVPAL

SEQ ID NO: 138782 - protein, 9 aa, Homo sapiens
EKMYVPALI

SEQ ID NO: 138783 - protein, 9 aa, Homo sapiens
KMYVPALIF

SEQ ID NO: 138784 - protein, 9 aa, Homo sapiens
MYVPALIFG

SEQ ID NO: 138785 - protein, 9 aa, Homo sapiens
YVPALIFGQ

SEQ ID NO: 138786 - protein, 9 aa, Homo sapiens
VPALIFGQL

SEQ ID NO: 138787 - protein, 9 aa, Homo sapiens
PALIFGQLL

SEQ ID NO: 138788 - protein, 9 aa, Homo sapiens
ALIFGQLLT

SEQ ID NO: 138789 - protein, 9 aa, Homo sapiens
LIFGQLLTS

SEQ ID NO: 138790 - protein, 9 aa, Homo sapiens
IFGQLLTSS

SEQ ID NO: 138791 - protein, 9 aa, Homo sapiens
FGQLLTSSN

SEQ ID NO: 138792 - protein, 9 aa, Homo sapiens
GQLLTSSNY

SEQ ID NO: 138793 - protein, 9 aa, Homo sapiens
QLLTSSNYD

SEQ ID NO: 138794 - protein, 9 aa, Homo sapiens
LLTSSNYDD

SEQ ID NO: 138795 - protein, 9 aa, Homo sapiens
LTSSNYDDD

SEQ ID NO: 138796 - protein, 9 aa, Homo sapiens
TSSNYDDDE

SEQ ID NO: 138797 - protein, 9 aa, Homo sapiens
SSNYDDDEK

SEQ ID NO: 138798 - protein, 9 aa, Homo sapiens
SNYDDDEKK

SEQ ID NO: 138799 - protein, 9 aa, Homo sapiens
NYDDDEKKV

SEQ ID NO: 138800 - protein, 9 aa, Homo sapiens
YDDDEKKVT

SEQ ID NO: 138801 - protein, 9 aa, Homo sapiens
DDDEKKVTG

SEQ ID NO: 138802 - protein, 9 aa, Homo sapiens
DDEKKVTGG

SEQ ID NO: 138803 - protein, 9 aa, Homo sapiens
DEKKVTGGR

SEQ ID NO: 138804 - protein, 9 aa, Homo sapiens
EKKVTGGRN

SEQ ID NO: 138805 - protein, 9 aa, Homo sapiens
KKVTGGRNG

SEQ ID NO: 138806 - protein, 9 aa, Homo sapiens
KVTGGRNGY

SEQ ID NO: 138807 - protein, 9 aa, Homo sapiens
VTGGRNGYG

SEQ ID NO: 138808 - protein, 9 aa, Homo sapiens
TGGRNGYGA

SEQ ID NO: 138809 - protein, 9 aa, Homo sapiens
GGRNGYGAK

SEQ ID NO: 138810 - protein, 9 aa, Homo sapiens
GRNGYGAKL

SEQ ID NO: 138811 - protein, 9 aa, Homo sapiens
RNGYGAKLC

SEQ ID NO: 138812 - protein, 9 aa, Homo sapiens
NGYGAKLCN

SEQ ID NO: 138813 - protein, 9 aa, Homo sapiens
GYGAKLCNI

SEQ ID NO: 138814 - protein, 9 aa, Homo sapiens
YGAKLCNIF

SEQ ID NO: 138815 - protein, 9 aa, Homo sapiens
GAKLCNIFS

SEQ ID NO: 138816 - protein, 9 aa, Homo sapiens
AKLCNIFST

SEQ ID NO: 138817 - protein, 9 aa, Homo sapiens
KLCNIFSTK

SEQ ID NO: 138818 - protein, 9 aa, Homo sapiens
LCNIFSTKF

SEQ ID NO: 138819 - protein, 9 aa, Homo sapiens
CNIFSTKFT

SEQ ID NO: 138820 - protein, 9 aa, Homo sapiens
NIFSTKFTV

SEQ ID NO: 138821 - protein, 9 aa, Homo sapiens
IFSTKFTVE

SEQ ID NO: 138822 - protein, 9 aa, Homo sapiens
FSTKFTVET

SEQ ID NO: 138823 - protein, 9 aa, Homo sapiens
STKFTVETA

SEQ ID NO: 138824 - protein, 9 aa, Homo sapiens
TKFTVETAS

SEQ ID NO: 138825 - protein, 9 aa, Homo sapiens
KFTVETASR

SEQ ID NO: 138826 - protein, 9 aa, Homo sapiens
FTVETASRE

SEQ ID NO: 138827 - protein, 9 aa, Homo sapiens
TVETASREY

SEQ ID NO: 138828 - protein, 9 aa, Homo sapiens
VETASREYK

SEQ ID NO: 138829 - protein, 9 aa, Homo sapiens
ETASREYKK

SEQ ID NO: 138830 - protein, 9 aa, Homo sapiens
TASREYKKM

SEQ ID NO: 138831 - protein, 9 aa, Homo sapiens
ASREYKKMF

SEQ ID NO: 138832 - protein, 9 aa, Homo sapiens
SREYKKMFK

SEQ ID NO: 138833 - protein, 9 aa, Homo sapiens
REYKKMFKQ

SEQ ID NO: 138834 - protein, 9 aa, Homo sapiens
EYKKMFKQT

SEQ ID NO: 138835 - protein, 9 aa, Homo sapiens
YKKMFKQTW

SEQ ID NO: 138836 - protein, 9 aa, Homo sapiens
KKMFKQTWM

SEQ ID NO: 138837 - protein, 9 aa, Homo sapiens
KMFKQTWMD

SEQ ID NO: 138838 - protein, 9 aa, Homo sapiens
MFKQTWMDN

SEQ ID NO: 138839 - protein, 9 aa, Homo sapiens
FKQTWMDNM

SEQ ID NO: 138840 - protein, 9 aa, Homo sapiens
KQTWMDNMG

SEQ ID NO: 138841 - protein, 9 aa, Homo sapiens
QTWMDNMGR

SEQ ID NO: 138842 - protein, 9 aa, Homo sapiens
TWMDNMGRA

SEQ ID NO: 138843 - protein, 9 aa, Homo sapiens
WMDNMGRAG

SEQ ID NO: 138844 - protein, 9 aa, Homo sapiens
MDNMGRAGE

SEQ ID NO: 138845 - protein, 9 aa, Homo sapiens
DNMGRAGEM

SEQ ID NO: 138846 - protein, 9 aa, Homo sapiens
NMGRAGEME

SEQ ID NO: 138847 - protein, 9 aa, Homo sapiens
MGRAGEMEL

SEQ ID NO: 138848 - protein, 9 aa, Homo sapiens
GRAGEMELK

SEQ ID NO: 138849 - protein, 9 aa, Homo sapiens
RAGEMELKP

SEQ ID NO: 138850 - protein, 9 aa, Homo sapiens
AGEMELKPF

SEQ ID NO: 138851 - protein, 9 aa, Homo sapiens
GEMELKPFN

SEQ ID NO: 138852 - protein, 9 aa, Homo sapiens
EMELKPFNG

SEQ ID NO: 138853 - protein, 9 aa, Homo sapiens
MELKPFNGE

SEQ ID NO: 138854 - protein, 9 aa, Homo sapiens
ELKPFNGED

SEQ ID NO: 138855 - protein, 9 aa, Homo sapiens
LKPFNGEDY

SEQ ID NO: 138856 - protein, 9 aa, Homo sapiens
KPFNGEDYT

SEQ ID NO: 138857 - protein, 9 aa, Homo sapiens
PFNGEDYTC

SEQ ID NO: 138858 - protein, 9 aa, Homo sapiens
FNGEDYTCI

SEQ ID NO: 138859 - protein, 9 aa, Homo sapiens
NGEDYTCIT

SEQ ID NO: 138860 - protein, 9 aa, Homo sapiens
GEDYTCITF

SEQ ID NO: 138861 - protein, 9 aa, Homo sapiens
EDYTCITFQ

SEQ ID NO: 138862 - protein, 9 aa, Homo sapiens
DYTCITFQP

SEQ ID NO: 138863 - protein, 9 aa, Homo sapiens
YTCITFQPD

SEQ ID NO: 138864 - protein, 9 aa, Homo sapiens
TCITFQPDL

SEQ ID NO: 138865 - protein, 9 aa, Homo sapiens
CITFQPDLS

SEQ ID NO: 138866 - protein, 9 aa, Homo sapiens
ITFQPDLSK

SEQ ID NO: 138867 - protein, 9 aa, Homo sapiens
TFQPDLSKF

SEQ ID NO: 138868 - protein, 9 aa, Homo sapiens
FQPDLSKFK

SEQ ID NO: 138869 - protein, 9 aa, Homo sapiens
QPDLSKFKM

SEQ ID NO: 138870 - protein, 9 aa, Homo sapiens
PDLSKFKMQ

SEQ ID NO: 138871 - protein, 9 aa, Homo sapiens
DLSKFKMQS

SEQ ID NO: 138872 - protein, 9 aa, Homo sapiens
LSKFKMQSL

SEQ ID NO: 138873 - protein, 9 aa, Homo sapiens
SKFKMQSLD

SEQ ID NO: 138874 - protein, 9 aa, Homo sapiens
KFKMQSLDK

SEQ ID NO: 138875 - protein, 9 aa, Homo sapiens
FKMQSLDKD

SEQ ID NO: 138876 - protein, 9 aa, Homo sapiens
KMQSLDKDI

SEQ ID NO: 138877 - protein, 9 aa, Homo sapiens
MQSLDKDIV

SEQ ID NO: 138878 - protein, 9 aa, Homo sapiens
QSLDKDIVA

SEQ ID NO: 138879 - protein, 9 aa, Homo sapiens
SLDKDIVAL

SEQ ID NO: 138880 - protein, 9 aa, Homo sapiens
LDKDIVALM

SEQ ID NO: 138881 - protein, 9 aa, Homo sapiens
DKDIVALMV

SEQ ID NO: 138882 - protein, 9 aa, Homo sapiens
KDIVALMVR

SEQ ID NO: 138883 - protein, 9 aa, Homo sapiens
DIVALMVRR

SEQ ID NO: 138884 - protein, 9 aa, Homo sapiens
IVALMVRRA

SEQ ID NO: 138885 - protein, 9 aa, Homo sapiens
VALMVRRAY

SEQ ID NO: 138886 - protein, 9 aa, Homo sapiens
ALMVRRAYD

SEQ ID NO: 138887 - protein, 9 aa, Homo sapiens
LMVRRAYDI

SEQ ID NO: 138888 - protein, 9 aa, Homo sapiens
MVRRAYDIA

SEQ ID NO: 138889 - protein, 9 aa, Homo sapiens
VRRAYDIAG

SEQ ID NO: 138890 - protein, 9 aa, Homo sapiens
RRAYDIAGS

SEQ ID NO: 138891 - protein, 9 aa, Homo sapiens
RAYDIAGST

SEQ ID NO: 138892 - protein, 9 aa, Homo sapiens
AYDIAGSTK

SEQ ID NO: 138893 - protein, 9 aa, Homo sapiens
YDIAGSTKD

SEQ ID NO: 138894 - protein, 9 aa, Homo sapiens
DIAGSTKDV

SEQ ID NO: 138895 - protein, 9 aa, Homo sapiens
IAGSTKDVK

SEQ ID NO: 138896 - protein, 9 aa, Homo sapiens
AGSTKDVKV

SEQ ID NO: 138897 - protein, 9 aa, Homo sapiens
GSTKDVKVF

SEQ ID NO: 138898 - protein, 9 aa, Homo sapiens
STKDVKVFL

SEQ ID NO: 138899 - protein, 9 aa, Homo sapiens
TKDVKVFLN

SEQ ID NO: 138900 - protein, 9 aa, Homo sapiens
KDVKVFLNG

SEQ ID NO: 138901 - protein, 9 aa, Homo sapiens
DVKVFLNGN

SEQ ID NO: 138902 - protein, 9 aa, Homo sapiens
VKVFLNGNK

SEQ ID NO: 138903 - protein, 9 aa, Homo sapiens
KVFLNGNKL

SEQ ID NO: 138904 - protein, 9 aa, Homo sapiens
VFLNGNKLP

SEQ ID NO: 138905 - protein, 9 aa, Homo sapiens
FLNGNKLPV

SEQ ID NO: 138906 - protein, 9 aa, Homo sapiens
LNGNKLPVK

SEQ ID NO: 138907 - protein, 9 aa, Homo sapiens
NGNKLPVKG

SEQ ID NO: 138908 - protein, 9 aa, Homo sapiens
GNKLPVKGF

SEQ ID NO: 138909 - protein, 9 aa, Homo sapiens
NKLPVKGFR

SEQ ID NO: 138910 - protein, 9 aa, Homo sapiens
KLPVKGFRS

SEQ ID NO: 138911 - protein, 9 aa, Homo sapiens
LPVKGFRSY

SEQ ID NO: 138912 - protein, 9 aa, Homo sapiens
PVKGFRSYV

SEQ ID NO: 138913 - protein, 9 aa, Homo sapiens
VKGFRSYVD

SEQ ID NO: 138914 - protein, 9 aa, Homo sapiens
KGFRSYVDM

SEQ ID NO: 138915 - protein, 9 aa, Homo sapiens
GFRSYVDMY

SEQ ID NO: 138916 - protein, 9 aa, Homo sapiens
FRSYVDMYL

SEQ ID NO: 138917 - protein, 9 aa, Homo sapiens
RSYVDMYLK

SEQ ID NO: 138918 - protein, 9 aa, Homo sapiens
SYVDMYLKD

SEQ ID NO: 138919 - protein, 9 aa, Homo sapiens
YVDMYLKDK

SEQ ID NO: 138920 - protein, 9 aa, Homo sapiens
VDMYLKDKL

SEQ ID NO: 138921 - protein, 9 aa, Homo sapiens
DMYLKDKLD

SEQ ID NO: 138922 - protein, 9 aa, Homo sapiens
MYLKDKLDE

SEQ ID NO: 138923 - protein, 9 aa, Homo sapiens
YLKDKLDET

SEQ ID NO: 138924 - protein, 9 aa, Homo sapiens
LKDKLDETG

SEQ ID NO: 138925 - protein, 9 aa, Homo sapiens
KDKLDETGN

SEQ ID NO: 138926 - protein, 9 aa, Homo sapiens
DKLDETGNS

SEQ ID NO: 138927 - protein, 9 aa, Homo sapiens
KLDETGNSL

SEQ ID NO: 138928 - protein, 9 aa, Homo sapiens
LDETGNSLK

SEQ ID NO: 138929 - protein, 9 aa, Homo sapiens
DETGNSLKV

SEQ ID NO: 138930 - protein, 9 aa, Homo sapiens
ETGNSLKVI

SEQ ID NO: 138931 - protein, 9 aa, Homo sapiens
TGNSLKVIH

SEQ ID NO: 138932 - protein, 9 aa, Homo sapiens
GNSLKVIHE

SEQ ID NO: 138933 - protein, 9 aa, Homo sapiens
NSLKVIHEQ

SEQ ID NO: 138934 - protein, 9 aa, Homo sapiens
SLKVIHEQV

SEQ ID NO: 138935 - protein, 9 aa, Homo sapiens
LKVIHEQVN

SEQ ID NO: 138936 - protein, 9 aa, Homo sapiens
KVIHEQVNH

SEQ ID NO: 138937 - protein, 9 aa, Homo sapiens
VIHEQVNHR

SEQ ID NO: 138938 - protein, 9 aa, Homo sapiens
IHEQVNHRW

SEQ ID NO: 138939 - protein, 9 aa, Homo sapiens
HEQVNHRWE

SEQ ID NO: 138940 - protein, 9 aa, Homo sapiens
EQVNHRWEV

SEQ ID NO: 138941 - protein, 9 aa, Homo sapiens
QVNHRWEVC

SEQ ID NO: 138942 - protein, 9 aa, Homo sapiens
VNHRWEVCL

SEQ ID NO: 138943 - protein, 9 aa, Homo sapiens
NHRWEVCLT

SEQ ID NO: 138944 - protein, 9 aa, Homo sapiens
HRWEVCLTM

SEQ ID NO: 138945 - protein, 9 aa, Homo sapiens
RWEVCLTMS

SEQ ID NO: 138946 - protein, 9 aa, Homo sapiens
WEVCLTMSE

SEQ ID NO: 138947 - protein, 9 aa, Homo sapiens
EVCLTMSEK

SEQ ID NO: 138948 - protein, 9 aa, Homo sapiens
VCLTMSEKG

SEQ ID NO: 138949 - protein, 9 aa, Homo sapiens
CLTMSEKGF

SEQ ID NO: 138950 - protein, 9 aa, Homo sapiens
LTMSEKGFQ

SEQ ID NO: 138951 - protein, 9 aa, Homo sapiens
TMSEKGFQQ

SEQ ID NO: 138952 - protein, 9 aa, Homo sapiens
MSEKGFQQI

SEQ ID NO: 138953 - protein, 9 aa, Homo sapiens
SEKGFQQIS

SEQ ID NO: 138954 - protein, 9 aa, Homo sapiens
EKGFQQISF

SEQ ID NO: 138955 - protein, 9 aa, Homo sapiens
KGFQQISFV

SEQ ID NO: 138956 - protein, 9 aa, Homo sapiens
GFQQISFVN

SEQ ID NO: 138957 - protein, 9 aa, Homo sapiens
FQQISFVNS

SEQ ID NO: 138958 - protein, 9 aa, Homo sapiens
QQISFVNSI

SEQ ID NO: 138959 - protein, 9 aa, Homo sapiens
QISFVNSIA

SEQ ID NO: 138960 - protein, 9 aa, Homo sapiens
ISFVNSIAT

SEQ ID NO: 138961 - protein, 9 aa, Homo sapiens
SFVNSIATS

SEQ ID NO: 138962 - protein, 9 aa, Homo sapiens
FVNSIATSK

SEQ ID NO: 138963 - protein, 9 aa, Homo sapiens
VNSIATSKG

SEQ ID NO: 138964 - protein, 9 aa, Homo sapiens
NSIATSKGG

SEQ ID NO: 138965 - protein, 9 aa, Homo sapiens
SIATSKGGR

SEQ ID NO: 138966 - protein, 9 aa, Homo sapiens
IATSKGGRH

SEQ ID NO: 138967 - protein, 9 aa, Homo sapiens
ATSKGGRHV

SEQ ID NO: 138968 - protein, 9 aa, Homo sapiens
TSKGGRHVD

SEQ ID NO: 138969 - protein, 9 aa, Homo sapiens
SKGGRHVDY

SEQ ID NO: 138970 - protein, 9 aa, Homo sapiens
KGGRHVDYV

SEQ ID NO: 138971 - protein, 9 aa, Homo sapiens
GGRHVDYVA

SEQ ID NO: 138972 - protein, 9 aa, Homo sapiens
GRHVDYVAD

SEQ ID NO: 138973 - protein, 9 aa, Homo sapiens
RHVDYVADQ

SEQ ID NO: 138974 - protein, 9 aa, Homo sapiens
HVDYVADQI

SEQ ID NO: 138975 - protein, 9 aa, Homo sapiens
VDYVADQIV

SEQ ID NO: 138976 - protein, 9 aa, Homo sapiens
DYVADQIVT

SEQ ID NO: 138977 - protein, 9 aa, Homo sapiens
YVADQIVTK

SEQ ID NO: 138978 - protein, 9 aa, Homo sapiens
VADQIVTKL

SEQ ID NO: 138979 - protein, 9 aa, Homo sapiens
ADQIVTKLV

SEQ ID NO: 138980 - protein, 9 aa, Homo sapiens
DQIVTKLVD

SEQ ID NO: 138981 - protein, 9 aa, Homo sapiens
QIVTKLVDV

SEQ ID NO: 138982 - protein, 9 aa, Homo sapiens
IVTKLVDVV

SEQ ID NO: 138983 - protein, 9 aa, Homo sapiens
VTKLVDVVK

SEQ ID NO: 138984 - protein, 9 aa, Homo sapiens
TKLVDVVKK

SEQ ID NO: 138985 - protein, 9 aa, Homo sapiens
KLVDVVKKK

SEQ ID NO: 138986 - protein, 9 aa, Homo sapiens
LVDVVKKKN

SEQ ID NO: 138987 - protein, 9 aa, Homo sapiens
VDVVKKKNK

SEQ ID NO: 138988 - protein, 9 aa, Homo sapiens
DVVKKKNKG

SEQ ID NO: 138989 - protein, 9 aa, Homo sapiens
VVKKKNKGG

SEQ ID NO: 138990 - protein, 9 aa, Homo sapiens
VKKKNKGGV

SEQ ID NO: 138991 - protein, 9 aa, Homo sapiens
KKKNKGGVA

SEQ ID NO: 138992 - protein, 9 aa, Homo sapiens
KKNKGGVAV

SEQ ID NO: 138993 - protein, 9 aa, Homo sapiens
KNKGGVAVK

SEQ ID NO: 138994 - protein, 9 aa, Homo sapiens
NKGGVAVKA

SEQ ID NO: 138995 - protein, 9 aa, Homo sapiens
KGGVAVKAH

SEQ ID NO: 138996 - protein, 9 aa, Homo sapiens
GGVAVKAHQ

SEQ ID NO: 138997 - protein, 9 aa, Homo sapiens
GVAVKAHQV

SEQ ID NO: 138998 - protein, 9 aa, Homo sapiens
VAVKAHQVK

SEQ ID NO: 138999 - protein, 9 aa, Homo sapiens
AVKAHQVKN

SEQ ID NO: 139000 - protein, 9 aa, Homo sapiens
VKAHQVKNH

SEQ ID NO: 139001 - protein, 9 aa, Homo sapiens
KAHQVKNHM

SEQ ID NO: 139002 - protein, 9 aa, Homo sapiens
AHQVKNHMW

SEQ ID NO: 139003 - protein, 9 aa, Homo sapiens
HQVKNHMWI

SEQ ID NO: 139004 - protein, 9 aa, Homo sapiens
QVKNHMWIF

SEQ ID NO: 139005 - protein, 9 aa, Homo sapiens
VKNHMWIFV

SEQ ID NO: 139006 - protein, 9 aa, Homo sapiens
KNHMWIFVN

SEQ ID NO: 139007 - protein, 9 aa, Homo sapiens
NHMWIFVNA

SEQ ID NO: 139008 - protein, 9 aa, Homo sapiens
HMWIFVNAL

SEQ ID NO: 139009 - protein, 9 aa, Homo sapiens
MWIFVNALI

SEQ ID NO: 139010 - protein, 9 aa, Homo sapiens
WIFVNALIE

SEQ ID NO: 139011 - protein, 9 aa, Homo sapiens
IFVNALIEN

SEQ ID NO: 139012 - protein, 9 aa, Homo sapiens
FVNALIENP

SEQ ID NO: 139013 - protein, 9 aa, Homo sapiens
VNALIENPT

SEQ ID NO: 139014 - protein, 9 aa, Homo sapiens
NALIENPTF

SEQ ID NO: 139015 - protein, 9 aa, Homo sapiens
ALIENPTFD

SEQ ID NO: 139016 - protein, 9 aa, Homo sapiens
LIENPTFDS

SEQ ID NO: 139017 - protein, 9 aa, Homo sapiens
IENPTFDSQ

SEQ ID NO: 139018 - protein, 9 aa, Homo sapiens
ENPTFDSQT

SEQ ID NO: 139019 - protein, 9 aa, Homo sapiens
NPTFDSQTK

SEQ ID NO: 139020 - protein, 9 aa, Homo sapiens
PTFDSQTKE

SEQ ID NO: 139021 - protein, 9 aa, Homo sapiens
TFDSQTKEN

SEQ ID NO: 139022 - protein, 9 aa, Homo sapiens
FDSQTKENM

SEQ ID NO: 139023 - protein, 9 aa, Homo sapiens
DSQTKENMT

SEQ ID NO: 139024 - protein, 9 aa, Homo sapiens
SQTKENMTL

SEQ ID NO: 139025 - protein, 9 aa, Homo sapiens
QTKENMTLQ

SEQ ID NO: 139026 - protein, 9 aa, Homo sapiens
TKENMTLQP

SEQ ID NO: 139027 - protein, 9 aa, Homo sapiens
KENMTLQPK

SEQ ID NO: 139028 - protein, 9 aa, Homo sapiens
ENMTLQPKS

SEQ ID NO: 139029 - protein, 9 aa, Homo sapiens
NMTLQPKSF

SEQ ID NO: 139030 - protein, 9 aa, Homo sapiens
MTLQPKSFG

SEQ ID NO: 139031 - protein, 9 aa, Homo sapiens
TLQPKSFGS

SEQ ID NO: 139032 - protein, 9 aa, Homo sapiens
LQPKSFGST

SEQ ID NO: 139033 - protein, 9 aa, Homo sapiens
QPKSFGSTC

SEQ ID NO: 139034 - protein, 9 aa, Homo sapiens
PKSFGSTCQ

SEQ ID NO: 139035 - protein, 9 aa, Homo sapiens
KSFGSTCQL

SEQ ID NO: 139036 - protein, 9 aa, Homo sapiens
SFGSTCQLS

SEQ ID NO: 139037 - protein, 9 aa, Homo sapiens
FGSTCQLSE

SEQ ID NO: 139038 - protein, 9 aa, Homo sapiens
GSTCQLSEK

SEQ ID NO: 139039 - protein, 9 aa, Homo sapiens
STCQLSEKF

SEQ ID NO: 139040 - protein, 9 aa, Homo sapiens
TCQLSEKFI

SEQ ID NO: 139041 - protein, 9 aa, Homo sapiens
CQLSEKFIK

SEQ ID NO: 139042 - protein, 9 aa, Homo sapiens
QLSEKFIKA

SEQ ID NO: 139043 - protein, 9 aa, Homo sapiens
LSEKFIKAA

SEQ ID NO: 139044 - protein, 9 aa, Homo sapiens
SEKFIKAAI

SEQ ID NO: 139045 - protein, 9 aa, Homo sapiens
EKFIKAAIG

SEQ ID NO: 139046 - protein, 9 aa, Homo sapiens
KFIKAAIGC

SEQ ID NO: 139047 - protein, 9 aa, Homo sapiens
FIKAAIGCG

SEQ ID NO: 139048 - protein, 9 aa, Homo sapiens
IKAAIGCGI

SEQ ID NO: 139049 - protein, 9 aa, Homo sapiens
KAAIGCGIV

SEQ ID NO: 139050 - protein, 9 aa, Homo sapiens
AAIGCGIVE

SEQ ID NO: 139051 - protein, 9 aa, Homo sapiens
AIGCGIVES

SEQ ID NO: 139052 - protein, 9 aa, Homo sapiens
IGCGIVESI

SEQ ID NO: 139053 - protein, 9 aa, Homo sapiens
GCGIVESIL

SEQ ID NO: 139054 - protein, 9 aa, Homo sapiens
CGIVESILN

SEQ ID NO: 139055 - protein, 9 aa, Homo sapiens
GIVESILNW

SEQ ID NO: 139056 - protein, 9 aa, Homo sapiens
IVESILNWV

SEQ ID NO: 139057 - protein, 9 aa, Homo sapiens
VESILNWVK

SEQ ID NO: 139058 - protein, 9 aa, Homo sapiens
ESILNWVKF

SEQ ID NO: 139059 - protein, 9 aa, Homo sapiens
SILNWVKFK

SEQ ID NO: 139060 - protein, 9 aa, Homo sapiens
ILNWVKFKA

SEQ ID NO: 139061 - protein, 9 aa, Homo sapiens
LNWVKFKAQ

SEQ ID NO: 139062 - protein, 9 aa, Homo sapiens
NWVKFKAQV

SEQ ID NO: 139063 - protein, 9 aa, Homo sapiens
WVKFKAQVQ

SEQ ID NO: 139064 - protein, 9 aa, Homo sapiens
VKFKAQVQL

SEQ ID NO: 139065 - protein, 9 aa, Homo sapiens
KFKAQVQLN

SEQ ID NO: 139066 - protein, 9 aa, Homo sapiens
FKAQVQLNK

SEQ ID NO: 139067 - protein, 9 aa, Homo sapiens
KAQVQLNKK

SEQ ID NO: 139068 - protein, 9 aa, Homo sapiens
AQVQLNKKC

SEQ ID NO: 139069 - protein, 9 aa, Homo sapiens
QVQLNKKCS

SEQ ID NO: 139070 - protein, 9 aa, Homo sapiens
VQLNKKCSA

SEQ ID NO: 139071 - protein, 9 aa, Homo sapiens
QLNKKCSAV

SEQ ID NO: 139072 - protein, 9 aa, Homo sapiens
LNKKCSAVK

SEQ ID NO: 139073 - protein, 9 aa, Homo sapiens
NKKCSAVKH

SEQ ID NO: 139074 - protein, 9 aa, Homo sapiens
KKCSAVKHN

SEQ ID NO: 139075 - protein, 9 aa, Homo sapiens
KCSAVKHNR

SEQ ID NO: 139076 - protein, 9 aa, Homo sapiens
CSAVKHNRI

SEQ ID NO: 139077 - protein, 9 aa, Homo sapiens
SAVKHNRIK

SEQ ID NO: 139078 - protein, 9 aa, Homo sapiens
AVKHNRIKG

SEQ ID NO: 139079 - protein, 9 aa, Homo sapiens
VKHNRIKGI

SEQ ID NO: 139080 - protein, 9 aa, Homo sapiens
KHNRIKGIP

SEQ ID NO: 139081 - protein, 9 aa, Homo sapiens
HNRIKGIPK

SEQ ID NO: 139082 - protein, 9 aa, Homo sapiens
NRIKGIPKL

SEQ ID NO: 139083 - protein, 9 aa, Homo sapiens
RIKGIPKLD

SEQ ID NO: 139084 - protein, 9 aa, Homo sapiens
IKGIPKLDD

SEQ ID NO: 139085 - protein, 9 aa, Homo sapiens
KGIPKLDDA

SEQ ID NO: 139086 - protein, 9 aa, Homo sapiens
GIPKLDDAN

SEQ ID NO: 139087 - protein, 9 aa, Homo sapiens
IPKLDDAND

SEQ ID NO: 139088 - protein, 9 aa, Homo sapiens
PKLDDANDA

SEQ ID NO: 139089 - protein, 9 aa, Homo sapiens
KLDDANDAG

SEQ ID NO: 139090 - protein, 9 aa, Homo sapiens
LDDANDAGG

SEQ ID NO: 139091 - protein, 9 aa, Homo sapiens
DDANDAGGR

SEQ ID NO: 139092 - protein, 9 aa, Homo sapiens
DANDAGGRN

SEQ ID NO: 139093 - protein, 9 aa, Homo sapiens
ANDAGGRNS

SEQ ID NO: 139094 - protein, 9 aa, Homo sapiens
NDAGGRNST

SEQ ID NO: 139095 - protein, 9 aa, Homo sapiens
DAGGRNSTE

SEQ ID NO: 139096 - protein, 9 aa, Homo sapiens
AGGRNSTEC

SEQ ID NO: 139097 - protein, 9 aa, Homo sapiens
GGRNSTECT

SEQ ID NO: 139098 - protein, 9 aa, Homo sapiens
GRNSTECTL

SEQ ID NO: 139099 - protein, 9 aa, Homo sapiens
RNSTECTLI

SEQ ID NO: 139100 - protein, 9 aa, Homo sapiens
NSTECTLIL

SEQ ID NO: 139101 - protein, 9 aa, Homo sapiens
STECTLILT

SEQ ID NO: 139102 - protein, 9 aa, Homo sapiens
TECTLILTE

SEQ ID NO: 139103 - protein, 9 aa, Homo sapiens
ECTLILTEG

SEQ ID NO: 139104 - protein, 9 aa, Homo sapiens
CTLILTEGD

SEQ ID NO: 139105 - protein, 9 aa, Homo sapiens
TLILTEGDS

SEQ ID NO: 139106 - protein, 9 aa, Homo sapiens
LILTEGDSA

SEQ ID NO: 139107 - protein, 9 aa, Homo sapiens
ILTEGDSAK

SEQ ID NO: 139108 - protein, 9 aa, Homo sapiens
LTEGDSAKT

SEQ ID NO: 139109 - protein, 9 aa, Homo sapiens
TEGDSAKTL

SEQ ID NO: 139110 - protein, 9 aa, Homo sapiens
EGDSAKTLA

SEQ ID NO: 139111 - protein, 9 aa, Homo sapiens
GDSAKTLAV

SEQ ID NO: 139112 - protein, 9 aa, Homo sapiens
DSAKTLAVS

SEQ ID NO: 139113 - protein, 9 aa, Homo sapiens
SAKTLAVSG

SEQ ID NO: 139114 - protein, 9 aa, Homo sapiens
AKTLAVSGL

SEQ ID NO: 139115 - protein, 9 aa, Homo sapiens
KTLAVSGLG

SEQ ID NO: 139116 - protein, 9 aa, Homo sapiens
TLAVSGLGV

SEQ ID NO: 139117 - protein, 9 aa, Homo sapiens
LAVSGLGVV

SEQ ID NO: 139118 - protein, 9 aa, Homo sapiens
AVSGLGVVG

SEQ ID NO: 139119 - protein, 9 aa, Homo sapiens
VSGLGVVGR

SEQ ID NO: 139120 - protein, 9 aa, Homo sapiens
SGLGVVGRD

SEQ ID NO: 139121 - protein, 9 aa, Homo sapiens
GLGVVGRDK

SEQ ID NO: 139122 - protein, 9 aa, Homo sapiens
LGVVGRDKY

SEQ ID NO: 139123 - protein, 9 aa, Homo sapiens
GVVGRDKYG

SEQ ID NO: 139124 - protein, 9 aa, Homo sapiens
VVGRDKYGV

SEQ ID NO: 139125 - protein, 9 aa, Homo sapiens
VGRDKYGVF

SEQ ID NO: 139126 - protein, 9 aa, Homo sapiens
GRDKYGVFP

SEQ ID NO: 139127 - protein, 9 aa, Homo sapiens
RDKYGVFPL

SEQ ID NO: 139128 - protein, 9 aa, Homo sapiens
DKYGVFPLR

SEQ ID NO: 139129 - protein, 9 aa, Homo sapiens
KYGVFPLRG

SEQ ID NO: 139130 - protein, 9 aa, Homo sapiens
YGVFPLRGK

SEQ ID NO: 139131 - protein, 9 aa, Homo sapiens
GVFPLRGKI

SEQ ID NO: 139132 - protein, 9 aa, Homo sapiens
VFPLRGKIL

SEQ ID NO: 139133 - protein, 9 aa, Homo sapiens
FPLRGKILN

SEQ ID NO: 139134 - protein, 9 aa, Homo sapiens
PLRGKILNV

SEQ ID NO: 139135 - protein, 9 aa, Homo sapiens
LRGKILNVR

SEQ ID NO: 139136 - protein, 9 aa, Homo sapiens
RGKILNVRE

SEQ ID NO: 139137 - protein, 9 aa, Homo sapiens
GKILNVREA

SEQ ID NO: 139138 - protein, 9 aa, Homo sapiens
KILNVREAS

SEQ ID NO: 139139 - protein, 9 aa, Homo sapiens
ILNVREASH

SEQ ID NO: 139140 - protein, 9 aa, Homo sapiens
LNVREASHK

SEQ ID NO: 139141 - protein, 9 aa, Homo sapiens
NVREASHKQ

SEQ ID NO: 139142 - protein, 9 aa, Homo sapiens
VREASHKQI

SEQ ID NO: 139143 - protein, 9 aa, Homo sapiens
REASHKQIM

SEQ ID NO: 139144 - protein, 9 aa, Homo sapiens
EASHKQIME

SEQ ID NO: 139145 - protein, 9 aa, Homo sapiens
ASHKQIMEN

SEQ ID NO: 139146 - protein, 9 aa, Homo sapiens
SHKQIMENA

SEQ ID NO: 139147 - protein, 9 aa, Homo sapiens
HKQIMENAE

SEQ ID NO: 139148 - protein, 9 aa, Homo sapiens
KQIMENAEI

SEQ ID NO: 139149 - protein, 9 aa, Homo sapiens
QIMENAEIN

SEQ ID NO: 139150 - protein, 9 aa, Homo sapiens
IMENAEINN

SEQ ID NO: 139151 - protein, 9 aa, Homo sapiens
MENAEINNI

SEQ ID NO: 139152 - protein, 9 aa, Homo sapiens
ENAEINNII

SEQ ID NO: 139153 - protein, 9 aa, Homo sapiens
NAEINNIIK

SEQ ID NO: 139154 - protein, 9 aa, Homo sapiens
AEINNIIKI

SEQ ID NO: 139155 - protein, 9 aa, Homo sapiens
EINNIIKIV

SEQ ID NO: 139156 - protein, 9 aa, Homo sapiens
INNIIKIVG

SEQ ID NO: 139157 - protein, 9 aa, Homo sapiens
NNIIKIVGL

SEQ ID NO: 139158 - protein, 9 aa, Homo sapiens
NIIKIVGLQ

SEQ ID NO: 139159 - protein, 9 aa, Homo sapiens
IIKIVGLQY

SEQ ID NO: 139160 - protein, 9 aa, Homo sapiens
IKIVGLQYK

SEQ ID NO: 139161 - protein, 9 aa, Homo sapiens
KIVGLQYKK

SEQ ID NO: 139162 - protein, 9 aa, Homo sapiens
IVGLQYKKN

SEQ ID NO: 139163 - protein, 9 aa, Homo sapiens
VGLQYKKNY

SEQ ID NO: 139164 - protein, 9 aa, Homo sapiens
GLQYKKNYE

SEQ ID NO: 139165 - protein, 9 aa, Homo sapiens
LQYKKNYED

SEQ ID NO: 139166 - protein, 9 aa, Homo sapiens
QYKKNYEDE

SEQ ID NO: 139167 - protein, 9 aa, Homo sapiens
YKKNYEDED

SEQ ID NO: 139168 - protein, 9 aa, Homo sapiens
KKNYEDEDS

SEQ ID NO: 139169 - protein, 9 aa, Homo sapiens
KNYEDEDSL

SEQ ID NO: 139170 - protein, 9 aa, Homo sapiens
NYEDEDSLK

SEQ ID NO: 139171 - protein, 9 aa, Homo sapiens
YEDEDSLKT

SEQ ID NO: 139172 - protein, 9 aa, Homo sapiens
EDEDSLKTL

SEQ ID NO: 139173 - protein, 9 aa, Homo sapiens
DEDSLKTLR

SEQ ID NO: 139174 - protein, 9 aa, Homo sapiens
EDSLKTLRY

SEQ ID NO: 139175 - protein, 9 aa, Homo sapiens
DSLKTLRYG

SEQ ID NO: 139176 - protein, 9 aa, Homo sapiens
SLKTLRYGK

SEQ ID NO: 139177 - protein, 9 aa, Homo sapiens
LKTLRYGKI

SEQ ID NO: 139178 - protein, 9 aa, Homo sapiens
KTLRYGKIM

SEQ ID NO: 139179 - protein, 9 aa, Homo sapiens
TLRYGKIMI

SEQ ID NO: 139180 - protein, 9 aa, Homo sapiens
LRYGKIMIM

SEQ ID NO: 139181 - protein, 9 aa, Homo sapiens
RYGKIMIMT

SEQ ID NO: 139182 - protein, 9 aa, Homo sapiens
YGKIMIMTD

SEQ ID NO: 139183 - protein, 9 aa, Homo sapiens
GKIMIMTDQ

SEQ ID NO: 139184 - protein, 9 aa, Homo sapiens
KIMIMTDQD

SEQ ID NO: 139185 - protein, 9 aa, Homo sapiens
IMIMTDQDQ

SEQ ID NO: 139186 - protein, 9 aa, Homo sapiens
MIMTDQDQD

SEQ ID NO: 139187 - protein, 9 aa, Homo sapiens
IMTDQDQDG

SEQ ID NO: 139188 - protein, 9 aa, Homo sapiens
MTDQDQDGS

SEQ ID NO: 139189 - protein, 9 aa, Homo sapiens
TDQDQDGSH

SEQ ID NO: 139190 - protein, 9 aa, Homo sapiens
DQDQDGSHI

SEQ ID NO: 139191 - protein, 9 aa, Homo sapiens
QDQDGSHIK

SEQ ID NO: 139192 - protein, 9 aa, Homo sapiens
DQDGSHIKG

SEQ ID NO: 139193 - protein, 9 aa, Homo sapiens
QDGSHIKGL

SEQ ID NO: 139194 - protein, 9 aa, Homo sapiens
DGSHIKGLL

SEQ ID NO: 139195 - protein, 9 aa, Homo sapiens
GSHIKGLLI

SEQ ID NO: 139196 - protein, 9 aa, Homo sapiens
SHIKGLLIN

SEQ ID NO: 139197 - protein, 9 aa, Homo sapiens
HIKGLLINF

SEQ ID NO: 139198 - protein, 9 aa, Homo sapiens
IKGLLINFI

SEQ ID NO: 139199 - protein, 9 aa, Homo sapiens
KGLLINFIH

SEQ ID NO: 139200 - protein, 9 aa, Homo sapiens
GLLINFIHH

SEQ ID NO: 139201 - protein, 9 aa, Homo sapiens
LLINFIHHN

SEQ ID NO: 139202 - protein, 9 aa, Homo sapiens
LINFIHHNW

SEQ ID NO: 139203 - protein, 9 aa, Homo sapiens
INFIHHNWP

SEQ ID NO: 139204 - protein, 9 aa, Homo sapiens
NFIHHNWPS

SEQ ID NO: 139205 - protein, 9 aa, Homo sapiens
FIHHNWPSL

SEQ ID NO: 139206 - protein, 9 aa, Homo sapiens
IHHNWPSLL

SEQ ID NO: 139207 - protein, 9 aa, Homo sapiens
HHNWPSLLR

SEQ ID NO: 139208 - protein, 9 aa, Homo sapiens
HNWPSLLRH

SEQ ID NO: 139209 - protein, 9 aa, Homo sapiens
NWPSLLRHR

SEQ ID NO: 139210 - protein, 9 aa, Homo sapiens
WPSLLRHRF

SEQ ID NO: 139211 - protein, 9 aa, Homo sapiens
PSLLRHRFL

SEQ ID NO: 139212 - protein, 9 aa, Homo sapiens
SLLRHRFLE

SEQ ID NO: 139213 - protein, 9 aa, Homo sapiens
LLRHRFLEE

SEQ ID NO: 139214 - protein, 9 aa, Homo sapiens
LRHRFLEEF

SEQ ID NO: 139215 - protein, 9 aa, Homo sapiens
RHRFLEEFI

SEQ ID NO: 139216 - protein, 9 aa, Homo sapiens
HRFLEEFIT

SEQ ID NO: 139217 - protein, 9 aa, Homo sapiens
RFLEEFITP

SEQ ID NO: 139218 - protein, 9 aa, Homo sapiens
FLEEFITPI

SEQ ID NO: 139219 - protein, 9 aa, Homo sapiens
LEEFITPIV

SEQ ID NO: 139220 - protein, 9 aa, Homo sapiens
EEFITPIVK

SEQ ID NO: 139221 - protein, 9 aa, Homo sapiens
EFITPIVKV

SEQ ID NO: 139222 - protein, 9 aa, Homo sapiens
FITPIVKVS

SEQ ID NO: 139223 - protein, 9 aa, Homo sapiens
ITPIVKVSK

SEQ ID NO: 139224 - protein, 9 aa, Homo sapiens
TPIVKVSKN

SEQ ID NO: 139225 - protein, 9 aa, Homo sapiens
PIVKVSKNK

SEQ ID NO: 139226 - protein, 9 aa, Homo sapiens
IVKVSKNKQ

SEQ ID NO: 139227 - protein, 9 aa, Homo sapiens
VKVSKNKQE

SEQ ID NO: 139228 - protein, 9 aa, Homo sapiens
KVSKNKQEM

SEQ ID NO: 139229 - protein, 9 aa, Homo sapiens
VSKNKQEMA

SEQ ID NO: 139230 - protein, 9 aa, Homo sapiens
SKNKQEMAF

SEQ ID NO: 139231 - protein, 9 aa, Homo sapiens
KNKQEMAFY

SEQ ID NO: 139232 - protein, 9 aa, Homo sapiens
NKQEMAFYS

SEQ ID NO: 139233 - protein, 9 aa, Homo sapiens
KQEMAFYSL

SEQ ID NO: 139234 - protein, 9 aa, Homo sapiens
QEMAFYSLP

SEQ ID NO: 139235 - protein, 9 aa, Homo sapiens
EMAFYSLPE

SEQ ID NO: 139236 - protein, 9 aa, Homo sapiens
MAFYSLPEF

SEQ ID NO: 139237 - protein, 9 aa, Homo sapiens
AFYSLPEFE

SEQ ID NO: 139238 - protein, 9 aa, Homo sapiens
FYSLPEFEE

SEQ ID NO: 139239 - protein, 9 aa, Homo sapiens
YSLPEFEEW

SEQ ID NO: 139240 - protein, 9 aa, Homo sapiens
SLPEFEEWK

SEQ ID NO: 139241 - protein, 9 aa, Homo sapiens
LPEFEEWKS

SEQ ID NO: 139242 - protein, 9 aa, Homo sapiens
PEFEEWKSS

SEQ ID NO: 139243 - protein, 9 aa, Homo sapiens
EFEEWKSST

SEQ ID NO: 139244 - protein, 9 aa, Homo sapiens
FEEWKSSTP

SEQ ID NO: 139245 - protein, 9 aa, Homo sapiens
EEWKSSTPN

SEQ ID NO: 139246 - protein, 9 aa, Homo sapiens
EWKSSTPNH

SEQ ID NO: 139247 - protein, 9 aa, Homo sapiens
WKSSTPNHK

SEQ ID NO: 139248 - protein, 9 aa, Homo sapiens
KSSTPNHKK

SEQ ID NO: 139249 - protein, 9 aa, Homo sapiens
SSTPNHKKW

SEQ ID NO: 139250 - protein, 9 aa, Homo sapiens
STPNHKKWK

SEQ ID NO: 139251 - protein, 9 aa, Homo sapiens
TPNHKKWKV

SEQ ID NO: 139252 - protein, 9 aa, Homo sapiens
PNHKKWKVK

SEQ ID NO: 139253 - protein, 9 aa, Homo sapiens
NHKKWKVKY

SEQ ID NO: 139254 - protein, 9 aa, Homo sapiens
HKKWKVKYY

SEQ ID NO: 139255 - protein, 9 aa, Homo sapiens
KKWKVKYYK

SEQ ID NO: 139256 - protein, 9 aa, Homo sapiens
KWKVKYYKG

SEQ ID NO: 139257 - protein, 9 aa, Homo sapiens
WKVKYYKGL

SEQ ID NO: 139258 - protein, 9 aa, Homo sapiens
KVKYYKGLG

SEQ ID NO: 139259 - protein, 9 aa, Homo sapiens
VKYYKGLGT

SEQ ID NO: 139260 - protein, 9 aa, Homo sapiens
KYYKGLGTS

SEQ ID NO: 139261 - protein, 9 aa, Homo sapiens
YYKGLGTST

SEQ ID NO: 139262 - protein, 9 aa, Homo sapiens
YKGLGTSTS

SEQ ID NO: 139263 - protein, 9 aa, Homo sapiens
KGLGTSTSK

SEQ ID NO: 139264 - protein, 9 aa, Homo sapiens
GLGTSTSKE

SEQ ID NO: 139265 - protein, 9 aa, Homo sapiens
LGTSTSKEA

SEQ ID NO: 139266 - protein, 9 aa, Homo sapiens
GTSTSKEAK

SEQ ID NO: 139267 - protein, 9 aa, Homo sapiens
TSTSKEAKE

SEQ ID NO: 139268 - protein, 9 aa, Homo sapiens
STSKEAKEY

SEQ ID NO: 139269 - protein, 9 aa, Homo sapiens
TSKEAKEYF

SEQ ID NO: 139270 - protein, 9 aa, Homo sapiens
SKEAKEYFA

SEQ ID NO: 139271 - protein, 9 aa, Homo sapiens
KEAKEYFAD

SEQ ID NO: 139272 - protein, 9 aa, Homo sapiens
EAKEYFADM

SEQ ID NO: 139273 - protein, 9 aa, Homo sapiens
AKEYFADMK

SEQ ID NO: 139274 - protein, 9 aa, Homo sapiens
KEYFADMKR

SEQ ID NO: 139275 - protein, 9 aa, Homo sapiens
EYFADMKRH

SEQ ID NO: 139276 - protein, 9 aa, Homo sapiens
YFADMKRHR

SEQ ID NO: 139277 - protein, 9 aa, Homo sapiens
FADMKRHRI

SEQ ID NO: 139278 - protein, 9 aa, Homo sapiens
ADMKRHRIQ

SEQ ID NO: 139279 - protein, 9 aa, Homo sapiens
DMKRHRIQF

SEQ ID NO: 139280 - protein, 9 aa, Homo sapiens
MKRHRIQFK

SEQ ID NO: 139281 - protein, 9 aa, Homo sapiens
KRHRIQFKY

SEQ ID NO: 139282 - protein, 9 aa, Homo sapiens
RHRIQFKYS

SEQ ID NO: 139283 - protein, 9 aa, Homo sapiens
HRIQFKYSG

SEQ ID NO: 139284 - protein, 9 aa, Homo sapiens
RIQFKYSGP

SEQ ID NO: 139285 - protein, 9 aa, Homo sapiens
IQFKYSGPE

SEQ ID NO: 139286 - protein, 9 aa, Homo sapiens
QFKYSGPED

SEQ ID NO: 139287 - protein, 9 aa, Homo sapiens
FKYSGPEDD

SEQ ID NO: 139288 - protein, 9 aa, Homo sapiens
KYSGPEDDA

SEQ ID NO: 139289 - protein, 9 aa, Homo sapiens
YSGPEDDAA

SEQ ID NO: 139290 - protein, 9 aa, Homo sapiens
SGPEDDAAI

SEQ ID NO: 139291 - protein, 9 aa, Homo sapiens
GPEDDAAIS

SEQ ID NO: 139292 - protein, 9 aa, Homo sapiens
PEDDAAISL

SEQ ID NO: 139293 - protein, 9 aa, Homo sapiens
EDDAAISLA

SEQ ID NO: 139294 - protein, 9 aa, Homo sapiens
DDAAISLAF

SEQ ID NO: 139295 - protein, 9 aa, Homo sapiens
DAAISLAFS

SEQ ID NO: 139296 - protein, 9 aa, Homo sapiens
AAISLAFSK

SEQ ID NO: 139297 - protein, 9 aa, Homo sapiens
AISLAFSKK

SEQ ID NO: 139298 - protein, 9 aa, Homo sapiens
ISLAFSKKQ

SEQ ID NO: 139299 - protein, 9 aa, Homo sapiens
SLAFSKKQI

SEQ ID NO: 139300 - protein, 9 aa, Homo sapiens
LAFSKKQID

SEQ ID NO: 139301 - protein, 9 aa, Homo sapiens
AFSKKQIDD

SEQ ID NO: 139302 - protein, 9 aa, Homo sapiens
FSKKQIDDR

SEQ ID NO: 139303 - protein, 9 aa, Homo sapiens
SKKQIDDRK

SEQ ID NO: 139304 - protein, 9 aa, Homo sapiens
KKQIDDRKE

SEQ ID NO: 139305 - protein, 9 aa, Homo sapiens
KQIDDRKEW

SEQ ID NO: 139306 - protein, 9 aa, Homo sapiens
QIDDRKEWL

SEQ ID NO: 139307 - protein, 9 aa, Homo sapiens
IDDRKEWLT

SEQ ID NO: 139308 - protein, 9 aa, Homo sapiens
DDRKEWLTN

SEQ ID NO: 139309 - protein, 9 aa, Homo sapiens
DRKEWLTNF

SEQ ID NO: 139310 - protein, 9 aa, Homo sapiens
RKEWLTNFM

SEQ ID NO: 139311 - protein, 9 aa, Homo sapiens
KEWLTNFME

SEQ ID NO: 139312 - protein, 9 aa, Homo sapiens
EWLTNFMED

SEQ ID NO: 139313 - protein, 9 aa, Homo sapiens
WLTNFMEDR

SEQ ID NO: 139314 - protein, 9 aa, Homo sapiens
LTNFMEDRR

SEQ ID NO: 139315 - protein, 9 aa, Homo sapiens
TNFMEDRRQ

SEQ ID NO: 139316 - protein, 9 aa, Homo sapiens
NFMEDRRQR

SEQ ID NO: 139317 - protein, 9 aa, Homo sapiens
FMEDRRQRK

SEQ ID NO: 139318 - protein, 9 aa, Homo sapiens
MEDRRQRKL

SEQ ID NO: 139319 - protein, 9 aa, Homo sapiens
EDRRQRKLL

SEQ ID NO: 139320 - protein, 9 aa, Homo sapiens
DRRQRKLLG

SEQ ID NO: 139321 - protein, 9 aa, Homo sapiens
RRQRKLLGL

SEQ ID NO: 139322 - protein, 9 aa, Homo sapiens
RQRKLLGLP

SEQ ID NO: 139323 - protein, 9 aa, Homo sapiens
QRKLLGLPE

SEQ ID NO: 139324 - protein, 9 aa, Homo sapiens
RKLLGLPED

SEQ ID NO: 139325 - protein, 9 aa, Homo sapiens
KLLGLPEDY

SEQ ID NO: 139326 - protein, 9 aa, Homo sapiens
LLGLPEDYL

SEQ ID NO: 139327 - protein, 9 aa, Homo sapiens
LGLPEDYLY

SEQ ID NO: 139328 - protein, 9 aa, Homo sapiens
GLPEDYLYG

SEQ ID NO: 139329 - protein, 9 aa, Homo sapiens
LPEDYLYGQ

SEQ ID NO: 139330 - protein, 9 aa, Homo sapiens
PEDYLYGQT

SEQ ID NO: 139331 - protein, 9 aa, Homo sapiens
EDYLYGQTT

SEQ ID NO: 139332 - protein, 9 aa, Homo sapiens
DYLYGQTTT

SEQ ID NO: 139333 - protein, 9 aa, Homo sapiens
YLYGQTTTY

SEQ ID NO: 139334 - protein, 9 aa, Homo sapiens
LYGQTTTYL

SEQ ID NO: 139335 - protein, 9 aa, Homo sapiens
YGQTTTYLT

SEQ ID NO: 139336 - protein, 9 aa, Homo sapiens
GQTTTYLTY

SEQ ID NO: 139337 - protein, 9 aa, Homo sapiens
QTTTYLTYN

SEQ ID NO: 139338 - protein, 9 aa, Homo sapiens
TTTYLTYND

SEQ ID NO: 139339 - protein, 9 aa, Homo sapiens
TTYLTYNDF

SEQ ID NO: 139340 - protein, 9 aa, Homo sapiens
TYLTYNDFI

SEQ ID NO: 139341 - protein, 9 aa, Homo sapiens
YLTYNDFIN

SEQ ID NO: 139342 - protein, 9 aa, Homo sapiens
LTYNDFINK

SEQ ID NO: 139343 - protein, 9 aa, Homo sapiens
TYNDFINKE

SEQ ID NO: 139344 - protein, 9 aa, Homo sapiens
YNDFINKEL

SEQ ID NO: 139345 - protein, 9 aa, Homo sapiens
NDFINKELI

SEQ ID NO: 139346 - protein, 9 aa, Homo sapiens
DFINKELIL

SEQ ID NO: 139347 - protein, 9 aa, Homo sapiens
FINKELILF

SEQ ID NO: 139348 - protein, 9 aa, Homo sapiens
INKELILFS

SEQ ID NO: 139349 - protein, 9 aa, Homo sapiens
NKELILFSN

SEQ ID NO: 139350 - protein, 9 aa, Homo sapiens
KELILFSNS

SEQ ID NO: 139351 - protein, 9 aa, Homo sapiens
ELILFSNSD

SEQ ID NO: 139352 - protein, 9 aa, Homo sapiens
LILFSNSDN

SEQ ID NO: 139353 - protein, 9 aa, Homo sapiens
ILFSNSDNE

SEQ ID NO: 139354 - protein, 9 aa, Homo sapiens
LFSNSDNER

SEQ ID NO: 139355 - protein, 9 aa, Homo sapiens
FSNSDNERS

SEQ ID NO: 139356 - protein, 9 aa, Homo sapiens
SNSDNERSI

SEQ ID NO: 139357 - protein, 9 aa, Homo sapiens
NSDNERSIP

SEQ ID NO: 139358 - protein, 9 aa, Homo sapiens
SDNERSIPS

SEQ ID NO: 139359 - protein, 9 aa, Homo sapiens
DNERSIPSM

SEQ ID NO: 139360 - protein, 9 aa, Homo sapiens
NERSIPSMV

SEQ ID NO: 139361 - protein, 9 aa, Homo sapiens
ERSIPSMVD

SEQ ID NO: 139362 - protein, 9 aa, Homo sapiens
RSIPSMVDG

SEQ ID NO: 139363 - protein, 9 aa, Homo sapiens
SIPSMVDGL

SEQ ID NO: 139364 - protein, 9 aa, Homo sapiens
IPSMVDGLK

SEQ ID NO: 139365 - protein, 9 aa, Homo sapiens
PSMVDGLKP

SEQ ID NO: 139366 - protein, 9 aa, Homo sapiens
SMVDGLKPG

SEQ ID NO: 139367 - protein, 9 aa, Homo sapiens
MVDGLKPGQ

SEQ ID NO: 139368 - protein, 9 aa, Homo sapiens
VDGLKPGQR

SEQ ID NO: 139369 - protein, 9 aa, Homo sapiens
DGLKPGQRK

SEQ ID NO: 139370 - protein, 9 aa, Homo sapiens
GLKPGQRKV

SEQ ID NO: 139371 - protein, 9 aa, Homo sapiens
LKPGQRKVL

SEQ ID NO: 139372 - protein, 9 aa, Homo sapiens
KPGQRKVLF

SEQ ID NO: 139373 - protein, 9 aa, Homo sapiens
PGQRKVLFT

SEQ ID NO: 139374 - protein, 9 aa, Homo sapiens
GQRKVLFTC

SEQ ID NO: 139375 - protein, 9 aa, Homo sapiens
QRKVLFTCF

SEQ ID NO: 139376 - protein, 9 aa, Homo sapiens
RKVLFTCFK

SEQ ID NO: 139377 - protein, 9 aa, Homo sapiens
KVLFTCFKR

SEQ ID NO: 139378 - protein, 9 aa, Homo sapiens
VLFTCFKRN

SEQ ID NO: 139379 - protein, 9 aa, Homo sapiens
LFTCFKRND

SEQ ID NO: 139380 - protein, 9 aa, Homo sapiens
FTCFKRNDK

SEQ ID NO: 139381 - protein, 9 aa, Homo sapiens
TCFKRNDKR

SEQ ID NO: 139382 - protein, 9 aa, Homo sapiens
CFKRNDKRE

SEQ ID NO: 139383 - protein, 9 aa, Homo sapiens
FKRNDKREV

SEQ ID NO: 139384 - protein, 9 aa, Homo sapiens
KRNDKREVK

SEQ ID NO: 139385 - protein, 9 aa, Homo sapiens
RNDKREVKV

SEQ ID NO: 139386 - protein, 9 aa, Homo sapiens
NDKREVKVA

SEQ ID NO: 139387 - protein, 9 aa, Homo sapiens
DKREVKVAQ

SEQ ID NO: 139388 - protein, 9 aa, Homo sapiens
KREVKVAQL

SEQ ID NO: 139389 - protein, 9 aa, Homo sapiens
REVKVAQLA

SEQ ID NO: 139390 - protein, 9 aa, Homo sapiens
EVKVAQLAG

SEQ ID NO: 139391 - protein, 9 aa, Homo sapiens
VKVAQLAGS

SEQ ID NO: 139392 - protein, 9 aa, Homo sapiens
KVAQLAGSV

SEQ ID NO: 139393 - protein, 9 aa, Homo sapiens
VAQLAGSVA

SEQ ID NO: 139394 - protein, 9 aa, Homo sapiens
AQLAGSVAE

SEQ ID NO: 139395 - protein, 9 aa, Homo sapiens
QLAGSVAEM

SEQ ID NO: 139396 - protein, 9 aa, Homo sapiens
LAGSVAEMS

SEQ ID NO: 139397 - protein, 9 aa, Homo sapiens
AGSVAEMSS

SEQ ID NO: 139398 - protein, 9 aa, Homo sapiens
GSVAEMSSY

SEQ ID NO: 139399 - protein, 9 aa, Homo sapiens
SVAEMSSYH

SEQ ID NO: 139400 - protein, 9 aa, Homo sapiens
VAEMSSYHH

SEQ ID NO: 139401 - protein, 9 aa, Homo sapiens
AEMSSYHHG

SEQ ID NO: 139402 - protein, 9 aa, Homo sapiens
EMSSYHHGE

SEQ ID NO: 139403 - protein, 9 aa, Homo sapiens
MSSYHHGEM

SEQ ID NO: 139404 - protein, 9 aa, Homo sapiens
SSYHHGEMS

SEQ ID NO: 139405 - protein, 9 aa, Homo sapiens
SYHHGEMSL

SEQ ID NO: 139406 - protein, 9 aa, Homo sapiens
YHHGEMSLM

SEQ ID NO: 139407 - protein, 9 aa, Homo sapiens
HHGEMSLMM

SEQ ID NO: 139408 - protein, 9 aa, Homo sapiens
HGEMSLMMT

SEQ ID NO: 139409 - protein, 9 aa, Homo sapiens
GEMSLMMTI

SEQ ID NO: 139410 - protein, 9 aa, Homo sapiens
EMSLMMTII

SEQ ID NO: 139411 - protein, 9 aa, Homo sapiens
MSLMMTIIN

SEQ ID NO: 139412 - protein, 9 aa, Homo sapiens
SLMMTIINL

SEQ ID NO: 139413 - protein, 9 aa, Homo sapiens
LMMTIINLA

SEQ ID NO: 139414 - protein, 9 aa, Homo sapiens
MMTIINLAQ

SEQ ID NO: 139415 - protein, 9 aa, Homo sapiens
MTIINLAQN

SEQ ID NO: 139416 - protein, 9 aa, Homo sapiens
TIINLAQNF

SEQ ID NO: 139417 - protein, 9 aa, Homo sapiens
IINLAQNFV

SEQ ID NO: 139418 - protein, 9 aa, Homo sapiens
INLAQNFVG

SEQ ID NO: 139419 - protein, 9 aa, Homo sapiens
NLAQNFVGS

SEQ ID NO: 139420 - protein, 9 aa, Homo sapiens
LAQNFVGSN

SEQ ID NO: 139421 - protein, 9 aa, Homo sapiens
AQNFVGSNN

SEQ ID NO: 139422 - protein, 9 aa, Homo sapiens
QNFVGSNNL

SEQ ID NO: 139423 - protein, 9 aa, Homo sapiens
NFVGSNNLN

SEQ ID NO: 139424 - protein, 9 aa, Homo sapiens
FVGSNNLNL

SEQ ID NO: 139425 - protein, 9 aa, Homo sapiens
VGSNNLNLL

SEQ ID NO: 139426 - protein, 9 aa, Homo sapiens
GSNNLNLLQ

SEQ ID NO: 139427 - protein, 9 aa, Homo sapiens
SNNLNLLQP

SEQ ID NO: 139428 - protein, 9 aa, Homo sapiens
NNLNLLQPI

SEQ ID NO: 139429 - protein, 9 aa, Homo sapiens
NLNLLQPIG

SEQ ID NO: 139430 - protein, 9 aa, Homo sapiens
LNLLQPIGQ

SEQ ID NO: 139431 - protein, 9 aa, Homo sapiens
NLLQPIGQF

SEQ ID NO: 139432 - protein, 9 aa, Homo sapiens
LLQPIGQFG

SEQ ID NO: 139433 - protein, 9 aa, Homo sapiens
LQPIGQFGT

SEQ ID NO: 139434 - protein, 9 aa, Homo sapiens
QPIGQFGTR

SEQ ID NO: 139435 - protein, 9 aa, Homo sapiens
PIGQFGTRL

SEQ ID NO: 139436 - protein, 9 aa, Homo sapiens
IGQFGTRLH

SEQ ID NO: 139437 - protein, 9 aa, Homo sapiens
GQFGTRLHG

SEQ ID NO: 139438 - protein, 9 aa, Homo sapiens
QFGTRLHGG

SEQ ID NO: 139439 - protein, 9 aa, Homo sapiens
FGTRLHGGK

SEQ ID NO: 139440 - protein, 9 aa, Homo sapiens
GTRLHGGKD

SEQ ID NO: 139441 - protein, 9 aa, Homo sapiens
TRLHGGKDS

SEQ ID NO: 139442 - protein, 9 aa, Homo sapiens
RLHGGKDSA

SEQ ID NO: 139443 - protein, 9 aa, Homo sapiens
LHGGKDSAS

SEQ ID NO: 139444 - protein, 9 aa, Homo sapiens
HGGKDSASP

SEQ ID NO: 139445 - protein, 9 aa, Homo sapiens
GGKDSASPR

SEQ ID NO: 139446 - protein, 9 aa, Homo sapiens
GKDSASPRY

SEQ ID NO: 139447 - protein, 9 aa, Homo sapiens
KDSASPRYI

SEQ ID NO: 139448 - protein, 9 aa, Homo sapiens
DSASPRYIF

SEQ ID NO: 139449 - protein, 9 aa, Homo sapiens
SASPRYIFT

SEQ ID NO: 139450 - protein, 9 aa, Homo sapiens
ASPRYIFTM

SEQ ID NO: 139451 - protein, 9 aa, Homo sapiens
SPRYIFTML

SEQ ID NO: 139452 - protein, 9 aa, Homo sapiens
PRYIFTMLS

SEQ ID NO: 139453 - protein, 9 aa, Homo sapiens
RYIFTMLSS

SEQ ID NO: 139454 - protein, 9 aa, Homo sapiens
YIFTMLSSL

SEQ ID NO: 139455 - protein, 9 aa, Homo sapiens
IFTMLSSLA

SEQ ID NO: 139456 - protein, 9 aa, Homo sapiens
FTMLSSLAR

SEQ ID NO: 139457 - protein, 9 aa, Homo sapiens
TMLSSLARL

SEQ ID NO: 139458 - protein, 9 aa, Homo sapiens
MLSSLARLL

SEQ ID NO: 139459 - protein, 9 aa, Homo sapiens
LSSLARLLF

SEQ ID NO: 139460 - protein, 9 aa, Homo sapiens
SSLARLLFP

SEQ ID NO: 139461 - protein, 9 aa, Homo sapiens
SLARLLFPP

SEQ ID NO: 139462 - protein, 9 aa, Homo sapiens
LARLLFPPK

SEQ ID NO: 139463 - protein, 9 aa, Homo sapiens
ARLLFPPKD

SEQ ID NO: 139464 - protein, 9 aa, Homo sapiens
RLLFPPKDD

SEQ ID NO: 139465 - protein, 9 aa, Homo sapiens
LLFPPKDDH

SEQ ID NO: 139466 - protein, 9 aa, Homo sapiens
LFPPKDDHT

SEQ ID NO: 139467 - protein, 9 aa, Homo sapiens
FPPKDDHTL

SEQ ID NO: 139468 - protein, 9 aa, Homo sapiens
PPKDDHTLK

SEQ ID NO: 139469 - protein, 9 aa, Homo sapiens
PKDDHTLKF

SEQ ID NO: 139470 - protein, 9 aa, Homo sapiens
KDDHTLKFL

SEQ ID NO: 139471 - protein, 9 aa, Homo sapiens
DDHTLKFLY

SEQ ID NO: 139472 - protein, 9 aa, Homo sapiens
DHTLKFLYD

SEQ ID NO: 139473 - protein, 9 aa, Homo sapiens
HTLKFLYDD

SEQ ID NO: 139474 - protein, 9 aa, Homo sapiens
TLKFLYDDN

SEQ ID NO: 139475 - protein, 9 aa, Homo sapiens
LKFLYDDNQ

SEQ ID NO: 139476 - protein, 9 aa, Homo sapiens
KFLYDDNQR

SEQ ID NO: 139477 - protein, 9 aa, Homo sapiens
FLYDDNQRV

SEQ ID NO: 139478 - protein, 9 aa, Homo sapiens
LYDDNQRVE

SEQ ID NO: 139479 - protein, 9 aa, Homo sapiens
YDDNQRVEP

SEQ ID NO: 139480 - protein, 9 aa, Homo sapiens
DDNQRVEPE

SEQ ID NO: 139481 - protein, 9 aa, Homo sapiens
DNQRVEPEW

SEQ ID NO: 139482 - protein, 9 aa, Homo sapiens
NQRVEPEWY

SEQ ID NO: 139483 - protein, 9 aa, Homo sapiens
QRVEPEWYI

SEQ ID NO: 139484 - protein, 9 aa, Homo sapiens
RVEPEWYIP

SEQ ID NO: 139485 - protein, 9 aa, Homo sapiens
VEPEWYIPI

SEQ ID NO: 139486 - protein, 9 aa, Homo sapiens
EPEWYIPII

SEQ ID NO: 139487 - protein, 9 aa, Homo sapiens
PEWYIPIIP

SEQ ID NO: 139488 - protein, 9 aa, Homo sapiens
EWYIPIIPM

SEQ ID NO: 139489 - protein, 9 aa, Homo sapiens
WYIPIIPMV

SEQ ID NO: 139490 - protein, 9 aa, Homo sapiens
YIPIIPMVL

SEQ ID NO: 139491 - protein, 9 aa, Homo sapiens
IPIIPMVLI

SEQ ID NO: 139492 - protein, 9 aa, Homo sapiens
PIIPMVLIN

SEQ ID NO: 139493 - protein, 9 aa, Homo sapiens
IIPMVLING

SEQ ID NO: 139494 - protein, 9 aa, Homo sapiens
IPMVLINGA

SEQ ID NO: 139495 - protein, 9 aa, Homo sapiens
PMVLINGAE

SEQ ID NO: 139496 - protein, 9 aa, Homo sapiens
MVLINGAEG

SEQ ID NO: 139497 - protein, 9 aa, Homo sapiens
VLINGAEGI

SEQ ID NO: 139498 - protein, 9 aa, Homo sapiens
LINGAEGIG

SEQ ID NO: 139499 - protein, 9 aa, Homo sapiens
INGAEGIGT

SEQ ID NO: 139500 - protein, 9 aa, Homo sapiens
NGAEGIGTG

SEQ ID NO: 139501 - protein, 9 aa, Homo sapiens
GAEGIGTGW

SEQ ID NO: 139502 - protein, 9 aa, Homo sapiens
AEGIGTGWS

SEQ ID NO: 139503 - protein, 9 aa, Homo sapiens
EGIGTGWSC

SEQ ID NO: 139504 - protein, 9 aa, Homo sapiens
GIGTGWSCK

SEQ ID NO: 139505 - protein, 9 aa, Homo sapiens
IGTGWSCKI

SEQ ID NO: 139506 - protein, 9 aa, Homo sapiens
GTGWSCKIP

SEQ ID NO: 139507 - protein, 9 aa, Homo sapiens
TGWSCKIPN

SEQ ID NO: 139508 - protein, 9 aa, Homo sapiens
GWSCKIPNF

SEQ ID NO: 139509 - protein, 9 aa, Homo sapiens
WSCKIPNFD

SEQ ID NO: 139510 - protein, 9 aa, Homo sapiens
SCKIPNFDV

SEQ ID NO: 139511 - protein, 9 aa, Homo sapiens
CKIPNFDVR

SEQ ID NO: 139512 - protein, 9 aa, Homo sapiens
KIPNFDVRE

SEQ ID NO: 139513 - protein, 9 aa, Homo sapiens
IPNFDVREI

SEQ ID NO: 139514 - protein, 9 aa, Homo sapiens
PNFDVREIV

SEQ ID NO: 139515 - protein, 9 aa, Homo sapiens
NFDVREIVN

SEQ ID NO: 139516 - protein, 9 aa, Homo sapiens
FDVREIVNN

SEQ ID NO: 139517 - protein, 9 aa, Homo sapiens
DVREIVNNI

SEQ ID NO: 139518 - protein, 9 aa, Homo sapiens
VREIVNNIR

SEQ ID NO: 139519 - protein, 9 aa, Homo sapiens
REIVNNIRR

SEQ ID NO: 139520 - protein, 9 aa, Homo sapiens
EIVNNIRRL

SEQ ID NO: 139521 - protein, 9 aa, Homo sapiens
IVNNIRRLM

SEQ ID NO: 139522 - protein, 9 aa, Homo sapiens
VNNIRRLMD

SEQ ID NO: 139523 - protein, 9 aa, Homo sapiens
NNIRRLMDG

SEQ ID NO: 139524 - protein, 9 aa, Homo sapiens
NIRRLMDGE

SEQ ID NO: 139525 - protein, 9 aa, Homo sapiens
IRRLMDGEE

SEQ ID NO: 139526 - protein, 9 aa, Homo sapiens
RRLMDGEEP

SEQ ID NO: 139527 - protein, 9 aa, Homo sapiens
RLMDGEEPL

SEQ ID NO: 139528 - protein, 9 aa, Homo sapiens
LMDGEEPLP

SEQ ID NO: 139529 - protein, 9 aa, Homo sapiens
MDGEEPLPM

SEQ ID NO: 139530 - protein, 9 aa, Homo sapiens
DGEEPLPML

SEQ ID NO: 139531 - protein, 9 aa, Homo sapiens
GEEPLPMLP

SEQ ID NO: 139532 - protein, 9 aa, Homo sapiens
EEPLPMLPS

SEQ ID NO: 139533 - protein, 9 aa, Homo sapiens
EPLPMLPSY

SEQ ID NO: 139534 - protein, 9 aa, Homo sapiens
PLPMLPSYK

SEQ ID NO: 139535 - protein, 9 aa, Homo sapiens
LPMLPSYKN

SEQ ID NO: 139536 - protein, 9 aa, Homo sapiens
PMLPSYKNF

SEQ ID NO: 139537 - protein, 9 aa, Homo sapiens
MLPSYKNFK

SEQ ID NO: 139538 - protein, 9 aa, Homo sapiens
LPSYKNFKG

SEQ ID NO: 139539 - protein, 9 aa, Homo sapiens
PSYKNFKGT

SEQ ID NO: 139540 - protein, 9 aa, Homo sapiens
SYKNFKGTI

SEQ ID NO: 139541 - protein, 9 aa, Homo sapiens
YKNFKGTIE

SEQ ID NO: 139542 - protein, 9 aa, Homo sapiens
KNFKGTIEE

SEQ ID NO: 139543 - protein, 9 aa, Homo sapiens
NFKGTIEEL

SEQ ID NO: 139544 - protein, 9 aa, Homo sapiens
FKGTIEELA

SEQ ID NO: 139545 - protein, 9 aa, Homo sapiens
KGTIEELAP

SEQ ID NO: 139546 - protein, 9 aa, Homo sapiens
GTIEELAPN

SEQ ID NO: 139547 - protein, 9 aa, Homo sapiens
TIEELAPNQ

SEQ ID NO: 139548 - protein, 9 aa, Homo sapiens
IEELAPNQY

SEQ ID NO: 139549 - protein, 9 aa, Homo sapiens
EELAPNQYV

SEQ ID NO: 139550 - protein, 9 aa, Homo sapiens
ELAPNQYVI

SEQ ID NO: 139551 - protein, 9 aa, Homo sapiens
LAPNQYVIS

SEQ ID NO: 139552 - protein, 9 aa, Homo sapiens
APNQYVISG

SEQ ID NO: 139553 - protein, 9 aa, Homo sapiens
PNQYVISGE

SEQ ID NO: 139554 - protein, 9 aa, Homo sapiens
NQYVISGEV

SEQ ID NO: 139555 - protein, 9 aa, Homo sapiens
QYVISGEVA

SEQ ID NO: 139556 - protein, 9 aa, Homo sapiens
YVISGEVAI

SEQ ID NO: 139557 - protein, 9 aa, Homo sapiens
VISGEVAIL

SEQ ID NO: 139558 - protein, 9 aa, Homo sapiens
ISGEVAILN

SEQ ID NO: 139559 - protein, 9 aa, Homo sapiens
SGEVAILNS

SEQ ID NO: 139560 - protein, 9 aa, Homo sapiens
GEVAILNST

SEQ ID NO: 139561 - protein, 9 aa, Homo sapiens
EVAILNSTT

SEQ ID NO: 139562 - protein, 9 aa, Homo sapiens
VAILNSTTI

SEQ ID NO: 139563 - protein, 9 aa, Homo sapiens
AILNSTTIE

SEQ ID NO: 139564 - protein, 9 aa, Homo sapiens
ILNSTTIEI

SEQ ID NO: 139565 - protein, 9 aa, Homo sapiens
LNSTTIEIS

SEQ ID NO: 139566 - protein, 9 aa, Homo sapiens
NSTTIEISE

SEQ ID NO: 139567 - protein, 9 aa, Homo sapiens
STTIEISEL

SEQ ID NO: 139568 - protein, 9 aa, Homo sapiens
TTIEISELP

SEQ ID NO: 139569 - protein, 9 aa, Homo sapiens
TIEISELPV

SEQ ID NO: 139570 - protein, 9 aa, Homo sapiens
IEISELPVR

SEQ ID NO: 139571 - protein, 9 aa, Homo sapiens
EISELPVRT

SEQ ID NO: 139572 - protein, 9 aa, Homo sapiens
ISELPVRTW

SEQ ID NO: 139573 - protein, 9 aa, Homo sapiens
SELPVRTWT

SEQ ID NO: 139574 - protein, 9 aa, Homo sapiens
ELPVRTWTQ

SEQ ID NO: 139575 - protein, 9 aa, Homo sapiens
LPVRTWTQT

SEQ ID NO: 139576 - protein, 9 aa, Homo sapiens
PVRTWTQTY

SEQ ID NO: 139577 - protein, 9 aa, Homo sapiens
VRTWTQTYK

SEQ ID NO: 139578 - protein, 9 aa, Homo sapiens
RTWTQTYKE

SEQ ID NO: 139579 - protein, 9 aa, Homo sapiens
TWTQTYKEQ

SEQ ID NO: 139580 - protein, 9 aa, Homo sapiens
WTQTYKEQV

SEQ ID NO: 139581 - protein, 9 aa, Homo sapiens
TQTYKEQVL

SEQ ID NO: 139582 - protein, 9 aa, Homo sapiens
QTYKEQVLE

SEQ ID NO: 139583 - protein, 9 aa, Homo sapiens
TYKEQVLEP

SEQ ID NO: 139584 - protein, 9 aa, Homo sapiens
YKEQVLEPM

SEQ ID NO: 139585 - protein, 9 aa, Homo sapiens
KEQVLEPML

SEQ ID NO: 139586 - protein, 9 aa, Homo sapiens
EQVLEPMLN

SEQ ID NO: 139587 - protein, 9 aa, Homo sapiens
QVLEPMLNG

SEQ ID NO: 139588 - protein, 9 aa, Homo sapiens
VLEPMLNGT

SEQ ID NO: 139589 - protein, 9 aa, Homo sapiens
LEPMLNGTE

SEQ ID NO: 139590 - protein, 9 aa, Homo sapiens
EPMLNGTEK

SEQ ID NO: 139591 - protein, 9 aa, Homo sapiens
PMLNGTEKT

SEQ ID NO: 139592 - protein, 9 aa, Homo sapiens
MLNGTEKTP

SEQ ID NO: 139593 - protein, 9 aa, Homo sapiens
LNGTEKTPP

SEQ ID NO: 139594 - protein, 9 aa, Homo sapiens
NGTEKTPPL

SEQ ID NO: 139595 - protein, 9 aa, Homo sapiens
GTEKTPPLI

SEQ ID NO: 139596 - protein, 9 aa, Homo sapiens
TEKTPPLIT

SEQ ID NO: 139597 - protein, 9 aa, Homo sapiens
EKTPPLITD

SEQ ID NO: 139598 - protein, 9 aa, Homo sapiens
KTPPLITDY

SEQ ID NO: 139599 - protein, 9 aa, Homo sapiens
TPPLITDYR

SEQ ID NO: 139600 - protein, 9 aa, Homo sapiens
PPLITDYRE

SEQ ID NO: 139601 - protein, 9 aa, Homo sapiens
PLITDYREY

SEQ ID NO: 139602 - protein, 9 aa, Homo sapiens
LITDYREYH

SEQ ID NO: 139603 - protein, 9 aa, Homo sapiens
ITDYREYHT

SEQ ID NO: 139604 - protein, 9 aa, Homo sapiens
TDYREYHTD

SEQ ID NO: 139605 - protein, 9 aa, Homo sapiens
DYREYHTDT

SEQ ID NO: 139606 - protein, 9 aa, Homo sapiens
YREYHTDTT

SEQ ID NO: 139607 - protein, 9 aa, Homo sapiens
REYHTDTTV

SEQ ID NO: 139608 - protein, 9 aa, Homo sapiens
EYHTDTTVK

SEQ ID NO: 139609 - protein, 9 aa, Homo sapiens
YHTDTTVKF

SEQ ID NO: 139610 - protein, 9 aa, Homo sapiens
HTDTTVKFV

SEQ ID NO: 139611 - protein, 9 aa, Homo sapiens
TDTTVKFVV

SEQ ID NO: 139612 - protein, 9 aa, Homo sapiens
DTTVKFVVK

SEQ ID NO: 139613 - protein, 9 aa, Homo sapiens
TTVKFVVKM

SEQ ID NO: 139614 - protein, 9 aa, Homo sapiens
TVKFVVKMT

SEQ ID NO: 139615 - protein, 9 aa, Homo sapiens
VKFVVKMTE

SEQ ID NO: 139616 - protein, 9 aa, Homo sapiens
KFVVKMTEE

SEQ ID NO: 139617 - protein, 9 aa, Homo sapiens
FVVKMTEEK

SEQ ID NO: 139618 - protein, 9 aa, Homo sapiens
VVKMTEEKL

SEQ ID NO: 139619 - protein, 9 aa, Homo sapiens
VKMTEEKLA

SEQ ID NO: 139620 - protein, 9 aa, Homo sapiens
KMTEEKLAE

SEQ ID NO: 139621 - protein, 9 aa, Homo sapiens
MTEEKLAEA

SEQ ID NO: 139622 - protein, 9 aa, Homo sapiens
TEEKLAEAE

SEQ ID NO: 139623 - protein, 9 aa, Homo sapiens
EEKLAEAER

SEQ ID NO: 139624 - protein, 9 aa, Homo sapiens
EKLAEAERV

SEQ ID NO: 139625 - protein, 9 aa, Homo sapiens
KLAEAERVG

SEQ ID NO: 139626 - protein, 9 aa, Homo sapiens
LAEAERVGL

SEQ ID NO: 139627 - protein, 9 aa, Homo sapiens
AEAERVGLH

SEQ ID NO: 139628 - protein, 9 aa, Homo sapiens
EAERVGLHK

SEQ ID NO: 139629 - protein, 9 aa, Homo sapiens
AERVGLHKV

SEQ ID NO: 139630 - protein, 9 aa, Homo sapiens
ERVGLHKVF

SEQ ID NO: 139631 - protein, 9 aa, Homo sapiens
RVGLHKVFK

SEQ ID NO: 139632 - protein, 9 aa, Homo sapiens
VGLHKVFKL

SEQ ID NO: 139633 - protein, 9 aa, Homo sapiens
GLHKVFKLQ

SEQ ID NO: 139634 - protein, 9 aa, Homo sapiens
LHKVFKLQT

SEQ ID NO: 139635 - protein, 9 aa, Homo sapiens
HKVFKLQTS

SEQ ID NO: 139636 - protein, 9 aa, Homo sapiens
KVFKLQTSL

SEQ ID NO: 139637 - protein, 9 aa, Homo sapiens
VFKLQTSLT

SEQ ID NO: 139638 - protein, 9 aa, Homo sapiens
FKLQTSLTC

SEQ ID NO: 139639 - protein, 9 aa, Homo sapiens
KLQTSLTCN

SEQ ID NO: 139640 - protein, 9 aa, Homo sapiens
LQTSLTCNS

SEQ ID NO: 139641 - protein, 9 aa, Homo sapiens
QTSLTCNSM

SEQ ID NO: 139642 - protein, 9 aa, Homo sapiens
TSLTCNSMV

SEQ ID NO: 139643 - protein, 9 aa, Homo sapiens
SLTCNSMVL

SEQ ID NO: 139644 - protein, 9 aa, Homo sapiens
LTCNSMVLF

SEQ ID NO: 139645 - protein, 9 aa, Homo sapiens
TCNSMVLFD

SEQ ID NO: 139646 - protein, 9 aa, Homo sapiens
CNSMVLFDH

SEQ ID NO: 139647 - protein, 9 aa, Homo sapiens
NSMVLFDHV

SEQ ID NO: 139648 - protein, 9 aa, Homo sapiens
SMVLFDHVG

SEQ ID NO: 139649 - protein, 9 aa, Homo sapiens
MVLFDHVGC

SEQ ID NO: 139650 - protein, 9 aa, Homo sapiens
VLFDHVGCL

SEQ ID NO: 139651 - protein, 9 aa, Homo sapiens
LFDHVGCLK

SEQ ID NO: 139652 - protein, 9 aa, Homo sapiens
FDHVGCLKK

SEQ ID NO: 139653 - protein, 9 aa, Homo sapiens
DHVGCLKKY

SEQ ID NO: 139654 - protein, 9 aa, Homo sapiens
HVGCLKKYD

SEQ ID NO: 139655 - protein, 9 aa, Homo sapiens
VGCLKKYDT

SEQ ID NO: 139656 - protein, 9 aa, Homo sapiens
GCLKKYDTV

SEQ ID NO: 139657 - protein, 9 aa, Homo sapiens
CLKKYDTVL

SEQ ID NO: 139658 - protein, 9 aa, Homo sapiens
LKKYDTVLD

SEQ ID NO: 139659 - protein, 9 aa, Homo sapiens
KKYDTVLDI

SEQ ID NO: 139660 - protein, 9 aa, Homo sapiens
KYDTVLDIL

SEQ ID NO: 139661 - protein, 9 aa, Homo sapiens
YDTVLDILR

SEQ ID NO: 139662 - protein, 9 aa, Homo sapiens
DTVLDILRD

SEQ ID NO: 139663 - protein, 9 aa, Homo sapiens
TVLDILRDF

SEQ ID NO: 139664 - protein, 9 aa, Homo sapiens
VLDILRDFF

SEQ ID NO: 139665 - protein, 9 aa, Homo sapiens
LDILRDFFE

SEQ ID NO: 139666 - protein, 9 aa, Homo sapiens
DILRDFFEL

SEQ ID NO: 139667 - protein, 9 aa, Homo sapiens
ILRDFFELR

SEQ ID NO: 139668 - protein, 9 aa, Homo sapiens
LRDFFELRL

SEQ ID NO: 139669 - protein, 9 aa, Homo sapiens
RDFFELRLK

SEQ ID NO: 139670 - protein, 9 aa, Homo sapiens
DFFELRLKY

SEQ ID NO: 139671 - protein, 9 aa, Homo sapiens
FFELRLKYY

SEQ ID NO: 139672 - protein, 9 aa, Homo sapiens
FELRLKYYG

SEQ ID NO: 139673 - protein, 9 aa, Homo sapiens
ELRLKYYGL

SEQ ID NO: 139674 - protein, 9 aa, Homo sapiens
LRLKYYGLR

SEQ ID NO: 139675 - protein, 9 aa, Homo sapiens
RLKYYGLRK

SEQ ID NO: 139676 - protein, 9 aa, Homo sapiens
LKYYGLRKE

SEQ ID NO: 139677 - protein, 9 aa, Homo sapiens
KYYGLRKEW

SEQ ID NO: 139678 - protein, 9 aa, Homo sapiens
YYGLRKEWL

SEQ ID NO: 139679 - protein, 9 aa, Homo sapiens
YGLRKEWLL

SEQ ID NO: 139680 - protein, 9 aa, Homo sapiens
GLRKEWLLG

SEQ ID NO: 139681 - protein, 9 aa, Homo sapiens
LRKEWLLGM

SEQ ID NO: 139682 - protein, 9 aa, Homo sapiens
RKEWLLGML

SEQ ID NO: 139683 - protein, 9 aa, Homo sapiens
KEWLLGMLG

SEQ ID NO: 139684 - protein, 9 aa, Homo sapiens
EWLLGMLGA

SEQ ID NO: 139685 - protein, 9 aa, Homo sapiens
WLLGMLGAE

SEQ ID NO: 139686 - protein, 9 aa, Homo sapiens
LLGMLGAES

SEQ ID NO: 139687 - protein, 9 aa, Homo sapiens
LGMLGAESA

SEQ ID NO: 139688 - protein, 9 aa, Homo sapiens
GMLGAESAK

SEQ ID NO: 139689 - protein, 9 aa, Homo sapiens
MLGAESAKL

SEQ ID NO: 139690 - protein, 9 aa, Homo sapiens
LGAESAKLN

SEQ ID NO: 139691 - protein, 9 aa, Homo sapiens
GAESAKLNN

SEQ ID NO: 139692 - protein, 9 aa, Homo sapiens
AESAKLNNQ

SEQ ID NO: 139693 - protein, 9 aa, Homo sapiens
ESAKLNNQA

SEQ ID NO: 139694 - protein, 9 aa, Homo sapiens
SAKLNNQAR

SEQ ID NO: 139695 - protein, 9 aa, Homo sapiens
AKLNNQARF

SEQ ID NO: 139696 - protein, 9 aa, Homo sapiens
KLNNQARFI

SEQ ID NO: 139697 - protein, 9 aa, Homo sapiens
LNNQARFIL

SEQ ID NO: 139698 - protein, 9 aa, Homo sapiens
NNQARFILE

SEQ ID NO: 139699 - protein, 9 aa, Homo sapiens
NQARFILEK

SEQ ID NO: 139700 - protein, 9 aa, Homo sapiens
QARFILEKI

SEQ ID NO: 139701 - protein, 9 aa, Homo sapiens
ARFILEKID

SEQ ID NO: 139702 - protein, 9 aa, Homo sapiens
RFILEKIDG

SEQ ID NO: 139703 - protein, 9 aa, Homo sapiens
FILEKIDGK

SEQ ID NO: 139704 - protein, 9 aa, Homo sapiens
ILEKIDGKI

SEQ ID NO: 139705 - protein, 9 aa, Homo sapiens
LEKIDGKII

SEQ ID NO: 139706 - protein, 9 aa, Homo sapiens
EKIDGKIII

SEQ ID NO: 139707 - protein, 9 aa, Homo sapiens
KIDGKIIIE

SEQ ID NO: 139708 - protein, 9 aa, Homo sapiens
IDGKIIIEN

SEQ ID NO: 139709 - protein, 9 aa, Homo sapiens
DGKIIIENK

SEQ ID NO: 139710 - protein, 9 aa, Homo sapiens
GKIIIENKP

SEQ ID NO: 139711 - protein, 9 aa, Homo sapiens
KIIIENKPK

SEQ ID NO: 139712 - protein, 9 aa, Homo sapiens
IIIENKPKK

SEQ ID NO: 139713 - protein, 9 aa, Homo sapiens
IIENKPKKE

SEQ ID NO: 139714 - protein, 9 aa, Homo sapiens
IENKPKKEL

SEQ ID NO: 139715 - protein, 9 aa, Homo sapiens
ENKPKKELI

SEQ ID NO: 139716 - protein, 9 aa, Homo sapiens
NKPKKELIK

SEQ ID NO: 139717 - protein, 9 aa, Homo sapiens
KPKKELIKV

SEQ ID NO: 139718 - protein, 9 aa, Homo sapiens
PKKELIKVL

SEQ ID NO: 139719 - protein, 9 aa, Homo sapiens
KKELIKVLI

SEQ ID NO: 139720 - protein, 9 aa, Homo sapiens
KELIKVLIQ

SEQ ID NO: 139721 - protein, 9 aa, Homo sapiens
ELIKVLIQR

SEQ ID NO: 139722 - protein, 9 aa, Homo sapiens
LIKVLIQRG

SEQ ID NO: 139723 - protein, 9 aa, Homo sapiens
IKVLIQRGY

SEQ ID NO: 139724 - protein, 9 aa, Homo sapiens
KVLIQRGYD

SEQ ID NO: 139725 - protein, 9 aa, Homo sapiens
VLIQRGYDS

SEQ ID NO: 139726 - protein, 9 aa, Homo sapiens
LIQRGYDSD

SEQ ID NO: 139727 - protein, 9 aa, Homo sapiens
IQRGYDSDP

SEQ ID NO: 139728 - protein, 9 aa, Homo sapiens
QRGYDSDPV

SEQ ID NO: 139729 - protein, 9 aa, Homo sapiens
RGYDSDPVK

SEQ ID NO: 139730 - protein, 9 aa, Homo sapiens
GYDSDPVKA

SEQ ID NO: 139731 - protein, 9 aa, Homo sapiens
YDSDPVKAW

SEQ ID NO: 139732 - protein, 9 aa, Homo sapiens
DSDPVKAWK

SEQ ID NO: 139733 - protein, 9 aa, Homo sapiens
SDPVKAWKE

SEQ ID NO: 139734 - protein, 9 aa, Homo sapiens
DPVKAWKEA

SEQ ID NO: 139735 - protein, 9 aa, Homo sapiens
PVKAWKEAQ

SEQ ID NO: 139736 - protein, 9 aa, Homo sapiens
VKAWKEAQQ

SEQ ID NO: 139737 - protein, 9 aa, Homo sapiens
KAWKEAQQK

SEQ ID NO: 139738 - protein, 9 aa, Homo sapiens
AWKEAQQKV

SEQ ID NO: 139739 - protein, 9 aa, Homo sapiens
WKEAQQKVP

SEQ ID NO: 139740 - protein, 9 aa, Homo sapiens
KEAQQKVPD

SEQ ID NO: 139741 - protein, 9 aa, Homo sapiens
EAQQKVPDE

SEQ ID NO: 139742 - protein, 9 aa, Homo sapiens
AQQKVPDEE

SEQ ID NO: 139743 - protein, 9 aa, Homo sapiens
QQKVPDEEE

SEQ ID NO: 139744 - protein, 9 aa, Homo sapiens
QKVPDEEEN

SEQ ID NO: 139745 - protein, 9 aa, Homo sapiens
KVPDEEENE

SEQ ID NO: 139746 - protein, 9 aa, Homo sapiens
VPDEEENEE

SEQ ID NO: 139747 - protein, 9 aa, Homo sapiens
PDEEENEES

SEQ ID NO: 139748 - protein, 9 aa, Homo sapiens
DEEENEESD

SEQ ID NO: 139749 - protein, 9 aa, Homo sapiens
EEENEESDN

SEQ ID NO: 139750 - protein, 9 aa, Homo sapiens
EENEESDNE

SEQ ID NO: 139751 - protein, 9 aa, Homo sapiens
ENEESDNEK

SEQ ID NO: 139752 - protein, 9 aa, Homo sapiens
NEESDNEKE

SEQ ID NO: 139753 - protein, 9 aa, Homo sapiens
EESDNEKET

SEQ ID NO: 139754 - protein, 9 aa, Homo sapiens
ESDNEKETE

SEQ ID NO: 139755 - protein, 9 aa, Homo sapiens
SDNEKETEK

SEQ ID NO: 139756 - protein, 9 aa, Homo sapiens
DNEKETEKS

SEQ ID NO: 139757 - protein, 9 aa, Homo sapiens
NEKETEKSD

SEQ ID NO: 139758 - protein, 9 aa, Homo sapiens
EKETEKSDS

SEQ ID NO: 139759 - protein, 9 aa, Homo sapiens
KETEKSDSV

SEQ ID NO: 139760 - protein, 9 aa, Homo sapiens
ETEKSDSVT

SEQ ID NO: 139761 - protein, 9 aa, Homo sapiens
TEKSDSVTD

SEQ ID NO: 139762 - protein, 9 aa, Homo sapiens
EKSDSVTDS

SEQ ID NO: 139763 - protein, 9 aa, Homo sapiens
KSDSVTDSG

SEQ ID NO: 139764 - protein, 9 aa, Homo sapiens
SDSVTDSGP

SEQ ID NO: 139765 - protein, 9 aa, Homo sapiens
DSVTDSGPT

SEQ ID NO: 139766 - protein, 9 aa, Homo sapiens
SVTDSGPTF

SEQ ID NO: 139767 - protein, 9 aa, Homo sapiens
VTDSGPTFN

SEQ ID NO: 139768 - protein, 9 aa, Homo sapiens
TDSGPTFNY

SEQ ID NO: 139769 - protein, 9 aa, Homo sapiens
DSGPTFNYL

SEQ ID NO: 139770 - protein, 9 aa, Homo sapiens
SGPTFNYLL

SEQ ID NO: 139771 - protein, 9 aa, Homo sapiens
GPTFNYLLD

SEQ ID NO: 139772 - protein, 9 aa, Homo sapiens
PTFNYLLDM

SEQ ID NO: 139773 - protein, 9 aa, Homo sapiens
TFNYLLDMP

SEQ ID NO: 139774 - protein, 9 aa, Homo sapiens
FNYLLDMPL

SEQ ID NO: 139775 - protein, 9 aa, Homo sapiens
NYLLDMPLW

SEQ ID NO: 139776 - protein, 9 aa, Homo sapiens
YLLDMPLWY

SEQ ID NO: 139777 - protein, 9 aa, Homo sapiens
LLDMPLWYL

SEQ ID NO: 139778 - protein, 9 aa, Homo sapiens
LDMPLWYLT

SEQ ID NO: 139779 - protein, 9 aa, Homo sapiens
DMPLWYLTK

SEQ ID NO: 139780 - protein, 9 aa, Homo sapiens
MPLWYLTKE

SEQ ID NO: 139781 - protein, 9 aa, Homo sapiens
PLWYLTKEK

SEQ ID NO: 139782 - protein, 9 aa, Homo sapiens
LWYLTKEKK

SEQ ID NO: 139783 - protein, 9 aa, Homo sapiens
WYLTKEKKD

SEQ ID NO: 139784 - protein, 9 aa, Homo sapiens
YLTKEKKDE

SEQ ID NO: 139785 - protein, 9 aa, Homo sapiens
LTKEKKDEL

SEQ ID NO: 139786 - protein, 9 aa, Homo sapiens
TKEKKDELC

SEQ ID NO: 139787 - protein, 9 aa, Homo sapiens
KEKKDELCR

SEQ ID NO: 139788 - protein, 9 aa, Homo sapiens
EKKDELCRL

SEQ ID NO: 139789 - protein, 9 aa, Homo sapiens
KKDELCRLR

SEQ ID NO: 139790 - protein, 9 aa, Homo sapiens
KDELCRLRN

SEQ ID NO: 139791 - protein, 9 aa, Homo sapiens
DELCRLRNE

SEQ ID NO: 139792 - protein, 9 aa, Homo sapiens
ELCRLRNEK

SEQ ID NO: 139793 - protein, 9 aa, Homo sapiens
LCRLRNEKE

SEQ ID NO: 139794 - protein, 9 aa, Homo sapiens
CRLRNEKEQ

SEQ ID NO: 139795 - protein, 9 aa, Homo sapiens
RLRNEKEQE

SEQ ID NO: 139796 - protein, 9 aa, Homo sapiens
LRNEKEQEL

SEQ ID NO: 139797 - protein, 9 aa, Homo sapiens
RNEKEQELD

SEQ ID NO: 139798 - protein, 9 aa, Homo sapiens
NEKEQELDT

SEQ ID NO: 139799 - protein, 9 aa, Homo sapiens
EKEQELDTL

SEQ ID NO: 139800 - protein, 9 aa, Homo sapiens
KEQELDTLK

SEQ ID NO: 139801 - protein, 9 aa, Homo sapiens
EQELDTLKR

SEQ ID NO: 139802 - protein, 9 aa, Homo sapiens
QELDTLKRK

SEQ ID NO: 139803 - protein, 9 aa, Homo sapiens
ELDTLKRKS

SEQ ID NO: 139804 - protein, 9 aa, Homo sapiens
LDTLKRKSP

SEQ ID NO: 139805 - protein, 9 aa, Homo sapiens
DTLKRKSPS

SEQ ID NO: 139806 - protein, 9 aa, Homo sapiens
TLKRKSPSD

SEQ ID NO: 139807 - protein, 9 aa, Homo sapiens
LKRKSPSDL

SEQ ID NO: 139808 - protein, 9 aa, Homo sapiens
KRKSPSDLW

SEQ ID NO: 139809 - protein, 9 aa, Homo sapiens
RKSPSDLWK

SEQ ID NO: 139810 - protein, 9 aa, Homo sapiens
KSPSDLWKE

SEQ ID NO: 139811 - protein, 9 aa, Homo sapiens
SPSDLWKED

SEQ ID NO: 139812 - protein, 9 aa, Homo sapiens
PSDLWKEDL

SEQ ID NO: 139813 - protein, 9 aa, Homo sapiens
SDLWKEDLA

SEQ ID NO: 139814 - protein, 9 aa, Homo sapiens
DLWKEDLAT

SEQ ID NO: 139815 - protein, 9 aa, Homo sapiens
LWKEDLATF

SEQ ID NO: 139816 - protein, 9 aa, Homo sapiens
WKEDLATFI

SEQ ID NO: 139817 - protein, 9 aa, Homo sapiens
KEDLATFIE

SEQ ID NO: 139818 - protein, 9 aa, Homo sapiens
EDLATFIEE

SEQ ID NO: 139819 - protein, 9 aa, Homo sapiens
DLATFIEEL

SEQ ID NO: 139820 - protein, 9 aa, Homo sapiens
LATFIEELE

SEQ ID NO: 139821 - protein, 9 aa, Homo sapiens
ATFIEELEA

SEQ ID NO: 139822 - protein, 9 aa, Homo sapiens
TFIEELEAV

SEQ ID NO: 139823 - protein, 9 aa, Homo sapiens
FIEELEAVE

SEQ ID NO: 139824 - protein, 9 aa, Homo sapiens
IEELEAVEA

SEQ ID NO: 139825 - protein, 9 aa, Homo sapiens
EELEAVEAK

SEQ ID NO: 139826 - protein, 9 aa, Homo sapiens
ELEAVEAKE

SEQ ID NO: 139827 - protein, 9 aa, Homo sapiens
LEAVEAKEK

SEQ ID NO: 139828 - protein, 9 aa, Homo sapiens
EAVEAKEKQ

SEQ ID NO: 139829 - protein, 9 aa, Homo sapiens
AVEAKEKQD

SEQ ID NO: 139830 - protein, 9 aa, Homo sapiens
VEAKEKQDE

SEQ ID NO: 139831 - protein, 9 aa, Homo sapiens
EAKEKQDEQ

SEQ ID NO: 139832 - protein, 9 aa, Homo sapiens
AKEKQDEQV

SEQ ID NO: 139833 - protein, 9 aa, Homo sapiens
KEKQDEQVG

SEQ ID NO: 139834 - protein, 9 aa, Homo sapiens
EKQDEQVGL

SEQ ID NO: 139835 - protein, 9 aa, Homo sapiens
KQDEQVGLP

SEQ ID NO: 139836 - protein, 9 aa, Homo sapiens
QDEQVGLPG

SEQ ID NO: 139837 - protein, 9 aa, Homo sapiens
DEQVGLPGK

SEQ ID NO: 139838 - protein, 9 aa, Homo sapiens
EQVGLPGKG

SEQ ID NO: 139839 - protein, 9 aa, Homo sapiens
QVGLPGKGG

SEQ ID NO: 139840 - protein, 9 aa, Homo sapiens
VGLPGKGGK

SEQ ID NO: 139841 - protein, 9 aa, Homo sapiens
GLPGKGGKA

SEQ ID NO: 139842 - protein, 9 aa, Homo sapiens
LPGKGGKAK

SEQ ID NO: 139843 - protein, 9 aa, Homo sapiens
PGKGGKAKG

SEQ ID NO: 139844 - protein, 9 aa, Homo sapiens
GKGGKAKGK

SEQ ID NO: 139845 - protein, 9 aa, Homo sapiens
KGGKAKGKK

SEQ ID NO: 139846 - protein, 9 aa, Homo sapiens
GGKAKGKKT

SEQ ID NO: 139847 - protein, 9 aa, Homo sapiens
GKAKGKKTQ

SEQ ID NO: 139848 - protein, 9 aa, Homo sapiens
KAKGKKTQM

SEQ ID NO: 139849 - protein, 9 aa, Homo sapiens
AKGKKTQMA

SEQ ID NO: 139850 - protein, 9 aa, Homo sapiens
KGKKTQMAE

SEQ ID NO: 139851 - protein, 9 aa, Homo sapiens
GKKTQMAEV

SEQ ID NO: 139852 - protein, 9 aa, Homo sapiens
KKTQMAEVL

SEQ ID NO: 139853 - protein, 9 aa, Homo sapiens
KTQMAEVLP

SEQ ID NO: 139854 - protein, 9 aa, Homo sapiens
TQMAEVLPS

SEQ ID NO: 139855 - protein, 9 aa, Homo sapiens
QMAEVLPSP

SEQ ID NO: 139856 - protein, 9 aa, Homo sapiens
MAEVLPSPR

SEQ ID NO: 139857 - protein, 9 aa, Homo sapiens
AEVLPSPRG

SEQ ID NO: 139858 - protein, 9 aa, Homo sapiens
EVLPSPRGQ

SEQ ID NO: 139859 - protein, 9 aa, Homo sapiens
VLPSPRGQR

SEQ ID NO: 139860 - protein, 9 aa, Homo sapiens
LPSPRGQRV

SEQ ID NO: 139861 - protein, 9 aa, Homo sapiens
PSPRGQRVI

SEQ ID NO: 139862 - protein, 9 aa, Homo sapiens
SPRGQRVIP

SEQ ID NO: 139863 - protein, 9 aa, Homo sapiens
PRGQRVIPR

SEQ ID NO: 139864 - protein, 9 aa, Homo sapiens
RGQRVIPRI

SEQ ID NO: 139865 - protein, 9 aa, Homo sapiens
GQRVIPRIT

SEQ ID NO: 139866 - protein, 9 aa, Homo sapiens
QRVIPRITI

SEQ ID NO: 139867 - protein, 9 aa, Homo sapiens
RVIPRITIE

SEQ ID NO: 139868 - protein, 9 aa, Homo sapiens
VIPRITIEM

SEQ ID NO: 139869 - protein, 9 aa, Homo sapiens
IPRITIEMK

SEQ ID NO: 139870 - protein, 9 aa, Homo sapiens
PRITIEMKA

SEQ ID NO: 139871 - protein, 9 aa, Homo sapiens
RITIEMKAE

SEQ ID NO: 139872 - protein, 9 aa, Homo sapiens
ITIEMKAEA

SEQ ID NO: 139873 - protein, 9 aa, Homo sapiens
TIEMKAEAE

SEQ ID NO: 139874 - protein, 9 aa, Homo sapiens
IEMKAEAEK

SEQ ID NO: 139875 - protein, 9 aa, Homo sapiens
EMKAEAEKK

SEQ ID NO: 139876 - protein, 9 aa, Homo sapiens
MKAEAEKKN

SEQ ID NO: 139877 - protein, 9 aa, Homo sapiens
KAEAEKKNK

SEQ ID NO: 139878 - protein, 9 aa, Homo sapiens
AEAEKKNKK

SEQ ID NO: 139879 - protein, 9 aa, Homo sapiens
EAEKKNKKK

SEQ ID NO: 139880 - protein, 9 aa, Homo sapiens
AEKKNKKKI

SEQ ID NO: 139881 - protein, 9 aa, Homo sapiens
EKKNKKKIK

SEQ ID NO: 139882 - protein, 9 aa, Homo sapiens
KKNKKKIKN

SEQ ID NO: 139883 - protein, 9 aa, Homo sapiens
KNKKKIKNE

SEQ ID NO: 139884 - protein, 9 aa, Homo sapiens
NKKKIKNEN

SEQ ID NO: 139885 - protein, 9 aa, Homo sapiens
KKKIKNENT

SEQ ID NO: 139886 - protein, 9 aa, Homo sapiens
KKIKNENTE

SEQ ID NO: 139887 - protein, 9 aa, Homo sapiens
KIKNENTEG

SEQ ID NO: 139888 - protein, 9 aa, Homo sapiens
IKNENTEGS

SEQ ID NO: 139889 - protein, 9 aa, Homo sapiens
KNENTEGSP

SEQ ID NO: 139890 - protein, 9 aa, Homo sapiens
NENTEGSPQ

SEQ ID NO: 139891 - protein, 9 aa, Homo sapiens
ENTEGSPQE

SEQ ID NO: 139892 - protein, 9 aa, Homo sapiens
NTEGSPQED

SEQ ID NO: 139893 - protein, 9 aa, Homo sapiens
TEGSPQEDG

SEQ ID NO: 139894 - protein, 9 aa, Homo sapiens
EGSPQEDGV

SEQ ID NO: 139895 - protein, 9 aa, Homo sapiens
GSPQEDGVE

SEQ ID NO: 139896 - protein, 9 aa, Homo sapiens
SPQEDGVEL

SEQ ID NO: 139897 - protein, 9 aa, Homo sapiens
PQEDGVELE

SEQ ID NO: 139898 - protein, 9 aa, Homo sapiens
QEDGVELEG

SEQ ID NO: 139899 - protein, 9 aa, Homo sapiens
EDGVELEGL

SEQ ID NO: 139900 - protein, 9 aa, Homo sapiens
DGVELEGLK

SEQ ID NO: 139901 - protein, 9 aa, Homo sapiens
GVELEGLKQ

SEQ ID NO: 139902 - protein, 9 aa, Homo sapiens
VELEGLKQR

SEQ ID NO: 139903 - protein, 9 aa, Homo sapiens
ELEGLKQRL

SEQ ID NO: 139904 - protein, 9 aa, Homo sapiens
LEGLKQRLE

SEQ ID NO: 139905 - protein, 9 aa, Homo sapiens
EGLKQRLEK

SEQ ID NO: 139906 - protein, 9 aa, Homo sapiens
GLKQRLEKK

SEQ ID NO: 139907 - protein, 9 aa, Homo sapiens
LKQRLEKKQ

SEQ ID NO: 139908 - protein, 9 aa, Homo sapiens
KQRLEKKQK

SEQ ID NO: 139909 - protein, 9 aa, Homo sapiens
QRLEKKQKR

SEQ ID NO: 139910 - protein, 9 aa, Homo sapiens
RLEKKQKRE

SEQ ID NO: 139911 - protein, 9 aa, Homo sapiens
LEKKQKREP

SEQ ID NO: 139912 - protein, 9 aa, Homo sapiens
EKKQKREPG

SEQ ID NO: 139913 - protein, 9 aa, Homo sapiens
KKQKREPGT

SEQ ID NO: 139914 - protein, 9 aa, Homo sapiens
KQKREPGTK

SEQ ID NO: 139915 - protein, 9 aa, Homo sapiens
QKREPGTKT

SEQ ID NO: 139916 - protein, 9 aa, Homo sapiens
KREPGTKTK

SEQ ID NO: 139917 - protein, 9 aa, Homo sapiens
REPGTKTKK

SEQ ID NO: 139918 - protein, 9 aa, Homo sapiens
EPGTKTKKQ

SEQ ID NO: 139919 - protein, 9 aa, Homo sapiens
PGTKTKKQT

SEQ ID NO: 139920 - protein, 9 aa, Homo sapiens
GTKTKKQTT

SEQ ID NO: 139921 - protein, 9 aa, Homo sapiens
TKTKKQTTL

SEQ ID NO: 139922 - protein, 9 aa, Homo sapiens
KTKKQTTLA

SEQ ID NO: 139923 - protein, 9 aa, Homo sapiens
TKKQTTLAF

SEQ ID NO: 139924 - protein, 9 aa, Homo sapiens
KKQTTLAFK

SEQ ID NO: 139925 - protein, 9 aa, Homo sapiens
KQTTLAFKP

SEQ ID NO: 139926 - protein, 9 aa, Homo sapiens
QTTLAFKPI

SEQ ID NO: 139927 - protein, 9 aa, Homo sapiens
TTLAFKPIK

SEQ ID NO: 139928 - protein, 9 aa, Homo sapiens
TLAFKPIKK

SEQ ID NO: 139929 - protein, 9 aa, Homo sapiens
LAFKPIKKG

SEQ ID NO: 139930 - protein, 9 aa, Homo sapiens
AFKPIKKGK

SEQ ID NO: 139931 - protein, 9 aa, Homo sapiens
FKPIKKGKK

SEQ ID NO: 139932 - protein, 9 aa, Homo sapiens
KPIKKGKKR

SEQ ID NO: 139933 - protein, 9 aa, Homo sapiens
PIKKGKKRN

SEQ ID NO: 139934 - protein, 9 aa, Homo sapiens
IKKGKKRNP

SEQ ID NO: 139935 - protein, 9 aa, Homo sapiens
KKGKKRNPW

SEQ ID NO: 139936 - protein, 9 aa, Homo sapiens
KGKKRNPWS

SEQ ID NO: 139937 - protein, 9 aa, Homo sapiens
GKKRNPWSD

SEQ ID NO: 139938 - protein, 9 aa, Homo sapiens
KKRNPWSDS

SEQ ID NO: 139939 - protein, 9 aa, Homo sapiens
KRNPWSDSE

SEQ ID NO: 139940 - protein, 9 aa, Homo sapiens
RNPWSDSES

SEQ ID NO: 139941 - protein, 9 aa, Homo sapiens
NPWSDSESD

SEQ ID NO: 139942 - protein, 9 aa, Homo sapiens
PWSDSESDR

SEQ ID NO: 139943 - protein, 9 aa, Homo sapiens
WSDSESDRS

SEQ ID NO: 139944 - protein, 9 aa, Homo sapiens
SDSESDRSS

SEQ ID NO: 139945 - protein, 9 aa, Homo sapiens
DSESDRSSD

SEQ ID NO: 139946 - protein, 9 aa, Homo sapiens
SESDRSSDE

SEQ ID NO: 139947 - protein, 9 aa, Homo sapiens
ESDRSSDES

SEQ ID NO: 139948 - protein, 9 aa, Homo sapiens
SDRSSDESN

SEQ ID NO: 139949 - protein, 9 aa, Homo sapiens
DRSSDESNF

SEQ ID NO: 139950 - protein, 9 aa, Homo sapiens
RSSDESNFD

SEQ ID NO: 139951 - protein, 9 aa, Homo sapiens
SSDESNFDV

SEQ ID NO: 139952 - protein, 9 aa, Homo sapiens
SDESNFDVP

SEQ ID NO: 139953 - protein, 9 aa, Homo sapiens
DESNFDVPP

SEQ ID NO: 139954 - protein, 9 aa, Homo sapiens
ESNFDVPPR

SEQ ID NO: 139955 - protein, 9 aa, Homo sapiens
SNFDVPPRE

SEQ ID NO: 139956 - protein, 9 aa, Homo sapiens
NFDVPPRET

SEQ ID NO: 139957 - protein, 9 aa, Homo sapiens
FDVPPRETE

SEQ ID NO: 139958 - protein, 9 aa, Homo sapiens
DVPPRETEP

SEQ ID NO: 139959 - protein, 9 aa, Homo sapiens
VPPRETEPR

SEQ ID NO: 139960 - protein, 9 aa, Homo sapiens
PPRETEPRR

SEQ ID NO: 139961 - protein, 9 aa, Homo sapiens
PRETEPRRA

SEQ ID NO: 139962 - protein, 9 aa, Homo sapiens
RETEPRRAA

SEQ ID NO: 139963 - protein, 9 aa, Homo sapiens
ETEPRRAAT

SEQ ID NO: 139964 - protein, 9 aa, Homo sapiens
TEPRRAATK

SEQ ID NO: 139965 - protein, 9 aa, Homo sapiens
EPRRAATKT

SEQ ID NO: 139966 - protein, 9 aa, Homo sapiens
PRRAATKTK

SEQ ID NO: 139967 - protein, 9 aa, Homo sapiens
RRAATKTKF

SEQ ID NO: 139968 - protein, 9 aa, Homo sapiens
RAATKTKFT

SEQ ID NO: 139969 - protein, 9 aa, Homo sapiens
AATKTKFTM

SEQ ID NO: 139970 - protein, 9 aa, Homo sapiens
ATKTKFTMD

SEQ ID NO: 139971 - protein, 9 aa, Homo sapiens
TKTKFTMDL

SEQ ID NO: 139972 - protein, 9 aa, Homo sapiens
KTKFTMDLD

SEQ ID NO: 139973 - protein, 9 aa, Homo sapiens
TKFTMDLDS

SEQ ID NO: 139974 - protein, 9 aa, Homo sapiens
KFTMDLDSD

SEQ ID NO: 139975 - protein, 9 aa, Homo sapiens
FTMDLDSDE

SEQ ID NO: 139976 - protein, 9 aa, Homo sapiens
TMDLDSDED

SEQ ID NO: 139977 - protein, 9 aa, Homo sapiens
MDLDSDEDF

SEQ ID NO: 139978 - protein, 9 aa, Homo sapiens
DLDSDEDFS

SEQ ID NO: 139979 - protein, 9 aa, Homo sapiens
LDSDEDFSD

SEQ ID NO: 139980 - protein, 9 aa, Homo sapiens
DSDEDFSDF

SEQ ID NO: 139981 - protein, 9 aa, Homo sapiens
SDEDFSDFD

SEQ ID NO: 139982 - protein, 9 aa, Homo sapiens
DEDFSDFDE

SEQ ID NO: 139983 - protein, 9 aa, Homo sapiens
EDFSDFDEK

SEQ ID NO: 139984 - protein, 9 aa, Homo sapiens
DFSDFDEKT

SEQ ID NO: 139985 - protein, 9 aa, Homo sapiens
FSDFDEKTD

SEQ ID NO: 139986 - protein, 9 aa, Homo sapiens
SDFDEKTDD

SEQ ID NO: 139987 - protein, 9 aa, Homo sapiens
DFDEKTDDE

SEQ ID NO: 139988 - protein, 9 aa, Homo sapiens
FDEKTDDED

SEQ ID NO: 139989 - protein, 9 aa, Homo sapiens
DEKTDDEDF

SEQ ID NO: 139990 - protein, 9 aa, Homo sapiens
EKTDDEDFV

SEQ ID NO: 139991 - protein, 9 aa, Homo sapiens
KTDDEDFVP

SEQ ID NO: 139992 - protein, 9 aa, Homo sapiens
TDDEDFVPS

SEQ ID NO: 139993 - protein, 9 aa, Homo sapiens
DDEDFVPSD

SEQ ID NO: 139994 - protein, 9 aa, Homo sapiens
DEDFVPSDA

SEQ ID NO: 139995 - protein, 9 aa, Homo sapiens
EDFVPSDAS

SEQ ID NO: 139996 - protein, 9 aa, Homo sapiens
DFVPSDASP

SEQ ID NO: 139997 - protein, 9 aa, Homo sapiens
FVPSDASPP

SEQ ID NO: 139998 - protein, 9 aa, Homo sapiens
VPSDASPPK

SEQ ID NO: 139999 - protein, 9 aa, Homo sapiens
PSDASPPKT

SEQ ID NO: 140000 - protein, 9 aa, Homo sapiens
SDASPPKTK

SEQ ID NO: 140001 - protein, 9 aa, Homo sapiens
DASPPKTKT

SEQ ID NO: 140002 - protein, 9 aa, Homo sapiens
ASPPKTKTS

SEQ ID NO: 140003 - protein, 9 aa, Homo sapiens
SPPKTKTSP

SEQ ID NO: 140004 - protein, 9 aa, Homo sapiens
PPKTKTSPK

SEQ ID NO: 140005 - protein, 9 aa, Homo sapiens
PKTKTSPKL

SEQ ID NO: 140006 - protein, 9 aa, Homo sapiens
KTKTSPKLS

SEQ ID NO: 140007 - protein, 9 aa, Homo sapiens
TKTSPKLSN

SEQ ID NO: 140008 - protein, 9 aa, Homo sapiens
KTSPKLSNK

SEQ ID NO: 140009 - protein, 9 aa, Homo sapiens
TSPKLSNKE

SEQ ID NO: 140010 - protein, 9 aa, Homo sapiens
SPKLSNKEL

SEQ ID NO: 140011 - protein, 9 aa, Homo sapiens
PKLSNKELK

SEQ ID NO: 140012 - protein, 9 aa, Homo sapiens
KLSNKELKP

SEQ ID NO: 140013 - protein, 9 aa, Homo sapiens
LSNKELKPQ

SEQ ID NO: 140014 - protein, 9 aa, Homo sapiens
SNKELKPQK

SEQ ID NO: 140015 - protein, 9 aa, Homo sapiens
NKELKPQKS

SEQ ID NO: 140016 - protein, 9 aa, Homo sapiens
KELKPQKSV

SEQ ID NO: 140017 - protein, 9 aa, Homo sapiens
ELKPQKSVV

SEQ ID NO: 140018 - protein, 9 aa, Homo sapiens
LKPQKSVVS

SEQ ID NO: 140019 - protein, 9 aa, Homo sapiens
KPQKSVVSD

SEQ ID NO: 140020 - protein, 9 aa, Homo sapiens
PQKSVVSDL

SEQ ID NO: 140021 - protein, 9 aa, Homo sapiens
QKSVVSDLE

SEQ ID NO: 140022 - protein, 9 aa, Homo sapiens
KSVVSDLEA

SEQ ID NO: 140023 - protein, 9 aa, Homo sapiens
SVVSDLEAD

SEQ ID NO: 140024 - protein, 9 aa, Homo sapiens
VVSDLEADD

SEQ ID NO: 140025 - protein, 9 aa, Homo sapiens
VSDLEADDV

SEQ ID NO: 140026 - protein, 9 aa, Homo sapiens
SDLEADDVK

SEQ ID NO: 140027 - protein, 9 aa, Homo sapiens
DLEADDVKG

SEQ ID NO: 140028 - protein, 9 aa, Homo sapiens
LEADDVKGS

SEQ ID NO: 140029 - protein, 9 aa, Homo sapiens
EADDVKGSV

SEQ ID NO: 140030 - protein, 9 aa, Homo sapiens
ADDVKGSVP

SEQ ID NO: 140031 - protein, 9 aa, Homo sapiens
DDVKGSVPL

SEQ ID NO: 140032 - protein, 9 aa, Homo sapiens
DVKGSVPLS

SEQ ID NO: 140033 - protein, 9 aa, Homo sapiens
VKGSVPLSS

SEQ ID NO: 140034 - protein, 9 aa, Homo sapiens
KGSVPLSSS

SEQ ID NO: 140035 - protein, 9 aa, Homo sapiens
GSVPLSSSP

SEQ ID NO: 140036 - protein, 9 aa, Homo sapiens
SVPLSSSPP

SEQ ID NO: 140037 - protein, 9 aa, Homo sapiens
VPLSSSPPA

SEQ ID NO: 140038 - protein, 9 aa, Homo sapiens
PLSSSPPAT

SEQ ID NO: 140039 - protein, 9 aa, Homo sapiens
LSSSPPATH

SEQ ID NO: 140040 - protein, 9 aa, Homo sapiens
SSSPPATHF

SEQ ID NO: 140041 - protein, 9 aa, Homo sapiens
SSPPATHFP

SEQ ID NO: 140042 - protein, 9 aa, Homo sapiens
SPPATHFPD

SEQ ID NO: 140043 - protein, 9 aa, Homo sapiens
PPATHFPDE

SEQ ID NO: 140044 - protein, 9 aa, Homo sapiens
PATHFPDET

SEQ ID NO: 140045 - protein, 9 aa, Homo sapiens
ATHFPDETE

SEQ ID NO: 140046 - protein, 9 aa, Homo sapiens
THFPDETEI

SEQ ID NO: 140047 - protein, 9 aa, Homo sapiens
HFPDETEIT

SEQ ID NO: 140048 - protein, 9 aa, Homo sapiens
FPDETEITN

SEQ ID NO: 140049 - protein, 9 aa, Homo sapiens
PDETEITNP

SEQ ID NO: 140050 - protein, 9 aa, Homo sapiens
DETEITNPV

SEQ ID NO: 140051 - protein, 9 aa, Homo sapiens
ETEITNPVP

SEQ ID NO: 140052 - protein, 9 aa, Homo sapiens
TEITNPVPK

SEQ ID NO: 140053 - protein, 9 aa, Homo sapiens
EITNPVPKK

SEQ ID NO: 140054 - protein, 9 aa, Homo sapiens
ITNPVPKKN

SEQ ID NO: 140055 - protein, 9 aa, Homo sapiens
TNPVPKKNV

SEQ ID NO: 140056 - protein, 9 aa, Homo sapiens
NPVPKKNVT

SEQ ID NO: 140057 - protein, 9 aa, Homo sapiens
PVPKKNVTV

SEQ ID NO: 140058 - protein, 9 aa, Homo sapiens
VPKKNVTVK

SEQ ID NO: 140059 - protein, 9 aa, Homo sapiens
PKKNVTVKK

SEQ ID NO: 140060 - protein, 9 aa, Homo sapiens
KKNVTVKKT

SEQ ID NO: 140061 - protein, 9 aa, Homo sapiens
KNVTVKKTA

SEQ ID NO: 140062 - protein, 9 aa, Homo sapiens
NVTVKKTAA

SEQ ID NO: 140063 - protein, 9 aa, Homo sapiens
VTVKKTAAK

SEQ ID NO: 140064 - protein, 9 aa, Homo sapiens
TVKKTAAKS

SEQ ID NO: 140065 - protein, 9 aa, Homo sapiens
VKKTAAKSQ

SEQ ID NO: 140066 - protein, 9 aa, Homo sapiens
KKTAAKSQS

SEQ ID NO: 140067 - protein, 9 aa, Homo sapiens
KTAAKSQSS

SEQ ID NO: 140068 - protein, 9 aa, Homo sapiens
TAAKSQSST

SEQ ID NO: 140069 - protein, 9 aa, Homo sapiens
AAKSQSSTS

SEQ ID NO: 140070 - protein, 9 aa, Homo sapiens
AKSQSSTST

SEQ ID NO: 140071 - protein, 9 aa, Homo sapiens
KSQSSTSTT

SEQ ID NO: 140072 - protein, 9 aa, Homo sapiens
SQSSTSTTG

SEQ ID NO: 140073 - protein, 9 aa, Homo sapiens
QSSTSTTGA

SEQ ID NO: 140074 - protein, 9 aa, Homo sapiens
SSTSTTGAK

SEQ ID NO: 140075 - protein, 9 aa, Homo sapiens
STSTTGAKK

SEQ ID NO: 140076 - protein, 9 aa, Homo sapiens
TSTTGAKKR

SEQ ID NO: 140077 - protein, 9 aa, Homo sapiens
STTGAKKRA

SEQ ID NO: 140078 - protein, 9 aa, Homo sapiens
TTGAKKRAA

SEQ ID NO: 140079 - protein, 9 aa, Homo sapiens
TGAKKRAAP

SEQ ID NO: 140080 - protein, 9 aa, Homo sapiens
GAKKRAAPK

SEQ ID NO: 140081 - protein, 9 aa, Homo sapiens
AKKRAAPKG

SEQ ID NO: 140082 - protein, 9 aa, Homo sapiens
KKRAAPKGT

SEQ ID NO: 140083 - protein, 9 aa, Homo sapiens
KRAAPKGTK

SEQ ID NO: 140084 - protein, 9 aa, Homo sapiens
RAAPKGTKR

SEQ ID NO: 140085 - protein, 9 aa, Homo sapiens
AAPKGTKRD

SEQ ID NO: 140086 - protein, 9 aa, Homo sapiens
APKGTKRDP

SEQ ID NO: 140087 - protein, 9 aa, Homo sapiens
PKGTKRDPA

SEQ ID NO: 140088 - protein, 9 aa, Homo sapiens
KGTKRDPAL

SEQ ID NO: 140089 - protein, 9 aa, Homo sapiens
GTKRDPALN

SEQ ID NO: 140090 - protein, 9 aa, Homo sapiens
TKRDPALNS

SEQ ID NO: 140091 - protein, 9 aa, Homo sapiens
KRDPALNSG

SEQ ID NO: 140092 - protein, 9 aa, Homo sapiens
RDPALNSGV

SEQ ID NO: 140093 - protein, 9 aa, Homo sapiens
DPALNSGVS

SEQ ID NO: 140094 - protein, 9 aa, Homo sapiens
PALNSGVSQ

SEQ ID NO: 140095 - protein, 9 aa, Homo sapiens
ALNSGVSQK

SEQ ID NO: 140096 - protein, 9 aa, Homo sapiens
LNSGVSQKP

SEQ ID NO: 140097 - protein, 9 aa, Homo sapiens
NSGVSQKPD

SEQ ID NO: 140098 - protein, 9 aa, Homo sapiens
SGVSQKPDP

SEQ ID NO: 140099 - protein, 9 aa, Homo sapiens
GVSQKPDPA

SEQ ID NO: 140100 - protein, 9 aa, Homo sapiens
VSQKPDPAK

SEQ ID NO: 140101 - protein, 9 aa, Homo sapiens
SQKPDPAKT

SEQ ID NO: 140102 - protein, 9 aa, Homo sapiens
QKPDPAKTK

SEQ ID NO: 140103 - protein, 9 aa, Homo sapiens
KPDPAKTKN

SEQ ID NO: 140104 - protein, 9 aa, Homo sapiens
PDPAKTKNR

SEQ ID NO: 140105 - protein, 9 aa, Homo sapiens
DPAKTKNRR

SEQ ID NO: 140106 - protein, 9 aa, Homo sapiens
PAKTKNRRK

SEQ ID NO: 140107 - protein, 9 aa, Homo sapiens
AKTKNRRKR

SEQ ID NO: 140108 - protein, 9 aa, Homo sapiens
KTKNRRKRK

SEQ ID NO: 140109 - protein, 9 aa, Homo sapiens
TKNRRKRKP

SEQ ID NO: 140110 - protein, 9 aa, Homo sapiens
KNRRKRKPS

SEQ ID NO: 140111 - protein, 9 aa, Homo sapiens
NRRKRKPST

SEQ ID NO: 140112 - protein, 9 aa, Homo sapiens
RRKRKPSTS

SEQ ID NO: 140113 - protein, 9 aa, Homo sapiens
RKRKPSTSD

SEQ ID NO: 140114 - protein, 9 aa, Homo sapiens
KRKPSTSDD

SEQ ID NO: 140115 - protein, 9 aa, Homo sapiens
RKPSTSDDS

SEQ ID NO: 140116 - protein, 9 aa, Homo sapiens
KPSTSDDSD

SEQ ID NO: 140117 - protein, 9 aa, Homo sapiens
PSTSDDSDS

SEQ ID NO: 140118 - protein, 9 aa, Homo sapiens
STSDDSDSN

SEQ ID NO: 140119 - protein, 9 aa, Homo sapiens
TSDDSDSNF

SEQ ID NO: 140120 - protein, 9 aa, Homo sapiens
SDDSDSNFE

SEQ ID NO: 140121 - protein, 9 aa, Homo sapiens
DDSDSNFEK

SEQ ID NO: 140122 - protein, 9 aa, Homo sapiens
DSDSNFEKI

SEQ ID NO: 140123 - protein, 9 aa, Homo sapiens
SDSNFEKIV

SEQ ID NO: 140124 - protein, 9 aa, Homo sapiens
DSNFEKIVS

SEQ ID NO: 140125 - protein, 9 aa, Homo sapiens
SNFEKIVSK

SEQ ID NO: 140126 - protein, 9 aa, Homo sapiens
NFEKIVSKA

SEQ ID NO: 140127 - protein, 9 aa, Homo sapiens
FEKIVSKAV

SEQ ID NO: 140128 - protein, 9 aa, Homo sapiens
EKIVSKAVT

SEQ ID NO: 140129 - protein, 9 aa, Homo sapiens
KIVSKAVTS

SEQ ID NO: 140130 - protein, 9 aa, Homo sapiens
IVSKAVTSK

SEQ ID NO: 140131 - protein, 9 aa, Homo sapiens
VSKAVTSKK

SEQ ID NO: 140132 - protein, 9 aa, Homo sapiens
SKAVTSKKS

SEQ ID NO: 140133 - protein, 9 aa, Homo sapiens
KAVTSKKSK

SEQ ID NO: 140134 - protein, 9 aa, Homo sapiens
AVTSKKSKG

SEQ ID NO: 140135 - protein, 9 aa, Homo sapiens
VTSKKSKGE

SEQ ID NO: 140136 - protein, 9 aa, Homo sapiens
TSKKSKGES

SEQ ID NO: 140137 - protein, 9 aa, Homo sapiens
SKKSKGESD

SEQ ID NO: 140138 - protein, 9 aa, Homo sapiens
KKSKGESDD

SEQ ID NO: 140139 - protein, 9 aa, Homo sapiens
KSKGESDDF

SEQ ID NO: 140140 - protein, 9 aa, Homo sapiens
SKGESDDFH

SEQ ID NO: 140141 - protein, 9 aa, Homo sapiens
KGESDDFHM

SEQ ID NO: 140142 - protein, 9 aa, Homo sapiens
GESDDFHMD

SEQ ID NO: 140143 - protein, 9 aa, Homo sapiens
ESDDFHMDF

SEQ ID NO: 140144 - protein, 9 aa, Homo sapiens
SDDFHMDFD

SEQ ID NO: 140145 - protein, 9 aa, Homo sapiens
DDFHMDFDS

SEQ ID NO: 140146 - protein, 9 aa, Homo sapiens
DFHMDFDSA

SEQ ID NO: 140147 - protein, 9 aa, Homo sapiens
FHMDFDSAV

SEQ ID NO: 140148 - protein, 9 aa, Homo sapiens
HMDFDSAVA

SEQ ID NO: 140149 - protein, 9 aa, Homo sapiens
MDFDSAVAP

SEQ ID NO: 140150 - protein, 9 aa, Homo sapiens
DFDSAVAPR

SEQ ID NO: 140151 - protein, 9 aa, Homo sapiens
FDSAVAPRA

SEQ ID NO: 140152 - protein, 9 aa, Homo sapiens
DSAVAPRAK

SEQ ID NO: 140153 - protein, 9 aa, Homo sapiens
SAVAPRAKS

SEQ ID NO: 140154 - protein, 9 aa, Homo sapiens
AVAPRAKSV

SEQ ID NO: 140155 - protein, 9 aa, Homo sapiens
VAPRAKSVR

SEQ ID NO: 140156 - protein, 9 aa, Homo sapiens
APRAKSVRA

SEQ ID NO: 140157 - protein, 9 aa, Homo sapiens
PRAKSVRAK

SEQ ID NO: 140158 - protein, 9 aa, Homo sapiens
RAKSVRAKK

SEQ ID NO: 140159 - protein, 9 aa, Homo sapiens
AKSVRAKKP

SEQ ID NO: 140160 - protein, 9 aa, Homo sapiens
KSVRAKKPI

SEQ ID NO: 140161 - protein, 9 aa, Homo sapiens
SVRAKKPIK

SEQ ID NO: 140162 - protein, 9 aa, Homo sapiens
VRAKKPIKY

SEQ ID NO: 140163 - protein, 9 aa, Homo sapiens
RAKKPIKYL

SEQ ID NO: 140164 - protein, 9 aa, Homo sapiens
AKKPIKYLE

SEQ ID NO: 140165 - protein, 9 aa, Homo sapiens
KKPIKYLEE

SEQ ID NO: 140166 - protein, 9 aa, Homo sapiens
KPIKYLEES

SEQ ID NO: 140167 - protein, 9 aa, Homo sapiens
PIKYLEESD

SEQ ID NO: 140168 - protein, 9 aa, Homo sapiens
IKYLEESDE

SEQ ID NO: 140169 - protein, 9 aa, Homo sapiens
KYLEESDED

SEQ ID NO: 140170 - protein, 9 aa, Homo sapiens
YLEESDEDD

SEQ ID NO: 140171 - protein, 9 aa, Homo sapiens
LEESDEDDL

SEQ ID NO: 140172 - protein, 9 aa, Homo sapiens
EESDEDDLF

SEQ ID NO: 140173 - protein, 9 aa, Homo sapiens
MLLAVLYCL

SEQ ID NO: 140174 - protein, 9 aa, Homo sapiens
LLAVLYCLL

SEQ ID NO: 140175 - protein, 9 aa, Homo sapiens
LAVLYCLLW

SEQ ID NO: 140176 - protein, 9 aa, Homo sapiens
AVLYCLLWS

SEQ ID NO: 140177 - protein, 9 aa, Homo sapiens
VLYCLLWSF

SEQ ID NO: 140178 - protein, 9 aa, Homo sapiens
LYCLLWSFQ

SEQ ID NO: 140179 - protein, 9 aa, Homo sapiens
YCLLWSFQT

SEQ ID NO: 140180 - protein, 9 aa, Homo sapiens
CLLWSFQTS

SEQ ID NO: 140181 - protein, 9 aa, Homo sapiens
LLWSFQTSA

SEQ ID NO: 140182 - protein, 9 aa, Homo sapiens
LWSFQTSAG

SEQ ID NO: 140183 - protein, 9 aa, Homo sapiens
WSFQTSAGH

SEQ ID NO: 140184 - protein, 9 aa, Homo sapiens
SFQTSAGHF

SEQ ID NO: 140185 - protein, 9 aa, Homo sapiens
FQTSAGHFP

SEQ ID NO: 140186 - protein, 9 aa, Homo sapiens
QTSAGHFPR

SEQ ID NO: 140187 - protein, 9 aa, Homo sapiens
TSAGHFPRA

SEQ ID NO: 140188 - protein, 9 aa, Homo sapiens
SAGHFPRAC

SEQ ID NO: 140189 - protein, 9 aa, Homo sapiens
AGHFPRACV

SEQ ID NO: 140190 - protein, 9 aa, Homo sapiens
GHFPRACVS

SEQ ID NO: 140191 - protein, 9 aa, Homo sapiens
HFPRACVSS

SEQ ID NO: 140192 - protein, 9 aa, Homo sapiens
FPRACVSSK

SEQ ID NO: 140193 - protein, 9 aa, Homo sapiens
PRACVSSKN

SEQ ID NO: 140194 - protein, 9 aa, Homo sapiens
RACVSSKNL

SEQ ID NO: 140195 - protein, 9 aa, Homo sapiens
ACVSSKNLM

SEQ ID NO: 140196 - protein, 9 aa, Homo sapiens
CVSSKNLME

SEQ ID NO: 140197 - protein, 9 aa, Homo sapiens
VSSKNLMEK

SEQ ID NO: 140198 - protein, 9 aa, Homo sapiens
SSKNLMEKE

SEQ ID NO: 140199 - protein, 9 aa, Homo sapiens
SKNLMEKEC

SEQ ID NO: 140200 - protein, 9 aa, Homo sapiens
KNLMEKECC

SEQ ID NO: 140201 - protein, 9 aa, Homo sapiens
NLMEKECCP

SEQ ID NO: 140202 - protein, 9 aa, Homo sapiens
LMEKECCPP

SEQ ID NO: 140203 - protein, 9 aa, Homo sapiens
MEKECCPPW

SEQ ID NO: 140204 - protein, 9 aa, Homo sapiens
EKECCPPWS

SEQ ID NO: 140205 - protein, 9 aa, Homo sapiens
KECCPPWSG

SEQ ID NO: 140206 - protein, 9 aa, Homo sapiens
ECCPPWSGD

SEQ ID NO: 140207 - protein, 9 aa, Homo sapiens
CCPPWSGDR

SEQ ID NO: 140208 - protein, 9 aa, Homo sapiens
CPPWSGDRS

SEQ ID NO: 140209 - protein, 9 aa, Homo sapiens
PPWSGDRSP

SEQ ID NO: 140210 - protein, 9 aa, Homo sapiens
PWSGDRSPC

SEQ ID NO: 140211 - protein, 9 aa, Homo sapiens
WSGDRSPCG

SEQ ID NO: 140212 - protein, 9 aa, Homo sapiens
SGDRSPCGQ

SEQ ID NO: 140213 - protein, 9 aa, Homo sapiens
GDRSPCGQL

SEQ ID NO: 140214 - protein, 9 aa, Homo sapiens
DRSPCGQLS

SEQ ID NO: 140215 - protein, 9 aa, Homo sapiens
RSPCGQLSG

SEQ ID NO: 140216 - protein, 9 aa, Homo sapiens
SPCGQLSGR

SEQ ID NO: 140217 - protein, 9 aa, Homo sapiens
PCGQLSGRG

SEQ ID NO: 140218 - protein, 9 aa, Homo sapiens
CGQLSGRGS

SEQ ID NO: 140219 - protein, 9 aa, Homo sapiens
GQLSGRGSC

SEQ ID NO: 140220 - protein, 9 aa, Homo sapiens
QLSGRGSCQ

SEQ ID NO: 140221 - protein, 9 aa, Homo sapiens
LSGRGSCQN

SEQ ID NO: 140222 - protein, 9 aa, Homo sapiens
SGRGSCQNI

SEQ ID NO: 140223 - protein, 9 aa, Homo sapiens
GRGSCQNIL

SEQ ID NO: 140224 - protein, 9 aa, Homo sapiens
RGSCQNILL

SEQ ID NO: 140225 - protein, 9 aa, Homo sapiens
GSCQNILLS

SEQ ID NO: 140226 - protein, 9 aa, Homo sapiens
SCQNILLSN

SEQ ID NO: 140227 - protein, 9 aa, Homo sapiens
CQNILLSNA

SEQ ID NO: 140228 - protein, 9 aa, Homo sapiens
QNILLSNAP

SEQ ID NO: 140229 - protein, 9 aa, Homo sapiens
NILLSNAPL

SEQ ID NO: 140230 - protein, 9 aa, Homo sapiens
ILLSNAPLG

SEQ ID NO: 140231 - protein, 9 aa, Homo sapiens
LLSNAPLGP

SEQ ID NO: 140232 - protein, 9 aa, Homo sapiens
LSNAPLGPQ

SEQ ID NO: 140233 - protein, 9 aa, Homo sapiens
SNAPLGPQF

SEQ ID NO: 140234 - protein, 9 aa, Homo sapiens
NAPLGPQFP

SEQ ID NO: 140235 - protein, 9 aa, Homo sapiens
APLGPQFPF

SEQ ID NO: 140236 - protein, 9 aa, Homo sapiens
PLGPQFPFT

SEQ ID NO: 140237 - protein, 9 aa, Homo sapiens
LGPQFPFTG

SEQ ID NO: 140238 - protein, 9 aa, Homo sapiens
GPQFPFTGV

SEQ ID NO: 140239 - protein, 9 aa, Homo sapiens
PQFPFTGVD

SEQ ID NO: 140240 - protein, 9 aa, Homo sapiens
QFPFTGVDD

SEQ ID NO: 140241 - protein, 9 aa, Homo sapiens
FPFTGVDDR

SEQ ID NO: 140242 - protein, 9 aa, Homo sapiens
PFTGVDDRE

SEQ ID NO: 140243 - protein, 9 aa, Homo sapiens
FTGVDDRES

SEQ ID NO: 140244 - protein, 9 aa, Homo sapiens
TGVDDRESW

SEQ ID NO: 140245 - protein, 9 aa, Homo sapiens
GVDDRESWP

SEQ ID NO: 140246 - protein, 9 aa, Homo sapiens
VDDRESWPS

SEQ ID NO: 140247 - protein, 9 aa, Homo sapiens
DDRESWPSV

SEQ ID NO: 140248 - protein, 9 aa, Homo sapiens
DRESWPSVF

SEQ ID NO: 140249 - protein, 9 aa, Homo sapiens
RESWPSVFY

SEQ ID NO: 140250 - protein, 9 aa, Homo sapiens
ESWPSVFYN

SEQ ID NO: 140251 - protein, 9 aa, Homo sapiens
SWPSVFYNR

SEQ ID NO: 140252 - protein, 9 aa, Homo sapiens
WPSVFYNRT

SEQ ID NO: 140253 - protein, 9 aa, Homo sapiens
PSVFYNRTC

SEQ ID NO: 140254 - protein, 9 aa, Homo sapiens
SVFYNRTCQ

SEQ ID NO: 140255 - protein, 9 aa, Homo sapiens
VFYNRTCQC

SEQ ID NO: 140256 - protein, 9 aa, Homo sapiens
FYNRTCQCS

SEQ ID NO: 140257 - protein, 9 aa, Homo sapiens
YNRTCQCSG

SEQ ID NO: 140258 - protein, 9 aa, Homo sapiens
NRTCQCSGN

SEQ ID NO: 140259 - protein, 9 aa, Homo sapiens
RTCQCSGNF

SEQ ID NO: 140260 - protein, 9 aa, Homo sapiens
TCQCSGNFM

SEQ ID NO: 140261 - protein, 9 aa, Homo sapiens
CQCSGNFMG

SEQ ID NO: 140262 - protein, 9 aa, Homo sapiens
QCSGNFMGF

SEQ ID NO: 140263 - protein, 9 aa, Homo sapiens
CSGNFMGFN

SEQ ID NO: 140264 - protein, 9 aa, Homo sapiens
SGNFMGFNC

SEQ ID NO: 140265 - protein, 9 aa, Homo sapiens
GNFMGFNCG

SEQ ID NO: 140266 - protein, 9 aa, Homo sapiens
NFMGFNCGN

SEQ ID NO: 140267 - protein, 9 aa, Homo sapiens
FMGFNCGNC

SEQ ID NO: 140268 - protein, 9 aa, Homo sapiens
MGFNCGNCK

SEQ ID NO: 140269 - protein, 9 aa, Homo sapiens
GFNCGNCKF

SEQ ID NO: 140270 - protein, 9 aa, Homo sapiens
FNCGNCKFG

SEQ ID NO: 140271 - protein, 9 aa, Homo sapiens
NCGNCKFGF

SEQ ID NO: 140272 - protein, 9 aa, Homo sapiens
CGNCKFGFW

SEQ ID NO: 140273 - protein, 9 aa, Homo sapiens
GNCKFGFWG

SEQ ID NO: 140274 - protein, 9 aa, Homo sapiens
NCKFGFWGP

SEQ ID NO: 140275 - protein, 9 aa, Homo sapiens
CKFGFWGPN

SEQ ID NO: 140276 - protein, 9 aa, Homo sapiens
KFGFWGPNC

SEQ ID NO: 140277 - protein, 9 aa, Homo sapiens
FGFWGPNCT

SEQ ID NO: 140278 - protein, 9 aa, Homo sapiens
GFWGPNCTE

SEQ ID NO: 140279 - protein, 9 aa, Homo sapiens
FWGPNCTER

SEQ ID NO: 140280 - protein, 9 aa, Homo sapiens
WGPNCTERR

SEQ ID NO: 140281 - protein, 9 aa, Homo sapiens
GPNCTERRL

SEQ ID NO: 140282 - protein, 9 aa, Homo sapiens
PNCTERRLL

SEQ ID NO: 140283 - protein, 9 aa, Homo sapiens
NCTERRLLV

SEQ ID NO: 140284 - protein, 9 aa, Homo sapiens
CTERRLLVR

SEQ ID NO: 140285 - protein, 9 aa, Homo sapiens
TERRLLVRR

SEQ ID NO: 140286 - protein, 9 aa, Homo sapiens
ERRLLVRRN

SEQ ID NO: 140287 - protein, 9 aa, Homo sapiens
RRLLVRRNI

SEQ ID NO: 140288 - protein, 9 aa, Homo sapiens
RLLVRRNIF

SEQ ID NO: 140289 - protein, 9 aa, Homo sapiens
LLVRRNIFD

SEQ ID NO: 140290 - protein, 9 aa, Homo sapiens
LVRRNIFDL

SEQ ID NO: 140291 - protein, 9 aa, Homo sapiens
VRRNIFDLS

SEQ ID NO: 140292 - protein, 9 aa, Homo sapiens
RRNIFDLSA

SEQ ID NO: 140293 - protein, 9 aa, Homo sapiens
RNIFDLSAP

SEQ ID NO: 140294 - protein, 9 aa, Homo sapiens
NIFDLSAPE

SEQ ID NO: 140295 - protein, 9 aa, Homo sapiens
IFDLSAPEK

SEQ ID NO: 140296 - protein, 9 aa, Homo sapiens
FDLSAPEKD

SEQ ID NO: 140297 - protein, 9 aa, Homo sapiens
DLSAPEKDK

SEQ ID NO: 140298 - protein, 9 aa, Homo sapiens
LSAPEKDKF

SEQ ID NO: 140299 - protein, 9 aa, Homo sapiens
SAPEKDKFF

SEQ ID NO: 140300 - protein, 9 aa, Homo sapiens
APEKDKFFA

SEQ ID NO: 140301 - protein, 9 aa, Homo sapiens
PEKDKFFAY

SEQ ID NO: 140302 - protein, 9 aa, Homo sapiens
EKDKFFAYL

SEQ ID NO: 140303 - protein, 9 aa, Homo sapiens
KDKFFAYLT

SEQ ID NO: 140304 - protein, 9 aa, Homo sapiens
DKFFAYLTL

SEQ ID NO: 140305 - protein, 9 aa, Homo sapiens
KFFAYLTLA

SEQ ID NO: 140306 - protein, 9 aa, Homo sapiens
FFAYLTLAK

SEQ ID NO: 140307 - protein, 9 aa, Homo sapiens
FAYLTLAKH

SEQ ID NO: 140308 - protein, 9 aa, Homo sapiens
AYLTLAKHT

SEQ ID NO: 140309 - protein, 9 aa, Homo sapiens
YLTLAKHTI

SEQ ID NO: 140310 - protein, 9 aa, Homo sapiens
LTLAKHTIS

SEQ ID NO: 140311 - protein, 9 aa, Homo sapiens
TLAKHTISS

SEQ ID NO: 140312 - protein, 9 aa, Homo sapiens
LAKHTISSD

SEQ ID NO: 140313 - protein, 9 aa, Homo sapiens
AKHTISSDY

SEQ ID NO: 140314 - protein, 9 aa, Homo sapiens
KHTISSDYV

SEQ ID NO: 140315 - protein, 9 aa, Homo sapiens
HTISSDYVI

SEQ ID NO: 140316 - protein, 9 aa, Homo sapiens
TISSDYVIP

SEQ ID NO: 140317 - protein, 9 aa, Homo sapiens
ISSDYVIPI

SEQ ID NO: 140318 - protein, 9 aa, Homo sapiens
SSDYVIPIG

SEQ ID NO: 140319 - protein, 9 aa, Homo sapiens
SDYVIPIGT

SEQ ID NO: 140320 - protein, 9 aa, Homo sapiens
DYVIPIGTY

SEQ ID NO: 140321 - protein, 9 aa, Homo sapiens
YVIPIGTYG

SEQ ID NO: 140322 - protein, 9 aa, Homo sapiens
VIPIGTYGQ

SEQ ID NO: 140323 - protein, 9 aa, Homo sapiens
IPIGTYGQM

SEQ ID NO: 140324 - protein, 9 aa, Homo sapiens
PIGTYGQMK

SEQ ID NO: 140325 - protein, 9 aa, Homo sapiens
IGTYGQMKN

SEQ ID NO: 140326 - protein, 9 aa, Homo sapiens
GTYGQMKNG

SEQ ID NO: 140327 - protein, 9 aa, Homo sapiens
TYGQMKNGS

SEQ ID NO: 140328 - protein, 9 aa, Homo sapiens
YGQMKNGST

SEQ ID NO: 140329 - protein, 9 aa, Homo sapiens
GQMKNGSTP

SEQ ID NO: 140330 - protein, 9 aa, Homo sapiens
QMKNGSTPM

SEQ ID NO: 140331 - protein, 9 aa, Homo sapiens
MKNGSTPMF

SEQ ID NO: 140332 - protein, 9 aa, Homo sapiens
KNGSTPMFN

SEQ ID NO: 140333 - protein, 9 aa, Homo sapiens
NGSTPMFND

SEQ ID NO: 140334 - protein, 9 aa, Homo sapiens
GSTPMFNDI

SEQ ID NO: 140335 - protein, 9 aa, Homo sapiens
STPMFNDIN

SEQ ID NO: 140336 - protein, 9 aa, Homo sapiens
TPMFNDINI

SEQ ID NO: 140337 - protein, 9 aa, Homo sapiens
PMFNDINIY

SEQ ID NO: 140338 - protein, 9 aa, Homo sapiens
MFNDINIYD

SEQ ID NO: 140339 - protein, 9 aa, Homo sapiens
FNDINIYDL

SEQ ID NO: 140340 - protein, 9 aa, Homo sapiens
NDINIYDLF

SEQ ID NO: 140341 - protein, 9 aa, Homo sapiens
DINIYDLFV

SEQ ID NO: 140342 - protein, 9 aa, Homo sapiens
INIYDLFVW

SEQ ID NO: 140343 - protein, 9 aa, Homo sapiens
NIYDLFVWM

SEQ ID NO: 140344 - protein, 9 aa, Homo sapiens
IYDLFVWMH

SEQ ID NO: 140345 - protein, 9 aa, Homo sapiens
YDLFVWMHY

SEQ ID NO: 140346 - protein, 9 aa, Homo sapiens
DLFVWMHYY

SEQ ID NO: 140347 - protein, 9 aa, Homo sapiens
LFVWMHYYV

SEQ ID NO: 140348 - protein, 9 aa, Homo sapiens
FVWMHYYVS

SEQ ID NO: 140349 - protein, 9 aa, Homo sapiens
VWMHYYVSM

SEQ ID NO: 140350 - protein, 9 aa, Homo sapiens
WMHYYVSMD

SEQ ID NO: 140351 - protein, 9 aa, Homo sapiens
MHYYVSMDA

SEQ ID NO: 140352 - protein, 9 aa, Homo sapiens
HYYVSMDAL

SEQ ID NO: 140353 - protein, 9 aa, Homo sapiens
YYVSMDALL

SEQ ID NO: 140354 - protein, 9 aa, Homo sapiens
YVSMDALLG

SEQ ID NO: 140355 - protein, 9 aa, Homo sapiens
VSMDALLGG

SEQ ID NO: 140356 - protein, 9 aa, Homo sapiens
SMDALLGGS

SEQ ID NO: 140357 - protein, 9 aa, Homo sapiens
MDALLGGSE

SEQ ID NO: 140358 - protein, 9 aa, Homo sapiens
DALLGGSEI

SEQ ID NO: 140359 - protein, 9 aa, Homo sapiens
ALLGGSEIW

SEQ ID NO: 140360 - protein, 9 aa, Homo sapiens
LLGGSEIWR

SEQ ID NO: 140361 - protein, 9 aa, Homo sapiens
LGGSEIWRD

SEQ ID NO: 140362 - protein, 9 aa, Homo sapiens
GGSEIWRDI

SEQ ID NO: 140363 - protein, 9 aa, Homo sapiens
GSEIWRDID

SEQ ID NO: 140364 - protein, 9 aa, Homo sapiens
SEIWRDIDF

SEQ ID NO: 140365 - protein, 9 aa, Homo sapiens
EIWRDIDFA

SEQ ID NO: 140366 - protein, 9 aa, Homo sapiens
IWRDIDFAH

SEQ ID NO: 140367 - protein, 9 aa, Homo sapiens
WRDIDFAHE

SEQ ID NO: 140368 - protein, 9 aa, Homo sapiens
RDIDFAHEA

SEQ ID NO: 140369 - protein, 9 aa, Homo sapiens
DIDFAHEAP

SEQ ID NO: 140370 - protein, 9 aa, Homo sapiens
IDFAHEAPA

SEQ ID NO: 140371 - protein, 9 aa, Homo sapiens
DFAHEAPAF

SEQ ID NO: 140372 - protein, 9 aa, Homo sapiens
FAHEAPAFL

SEQ ID NO: 140373 - protein, 9 aa, Homo sapiens
AHEAPAFLP

SEQ ID NO: 140374 - protein, 9 aa, Homo sapiens
HEAPAFLPW

SEQ ID NO: 140375 - protein, 9 aa, Homo sapiens
EAPAFLPWH

SEQ ID NO: 140376 - protein, 9 aa, Homo sapiens
APAFLPWHR

SEQ ID NO: 140377 - protein, 9 aa, Homo sapiens
PAFLPWHRL

SEQ ID NO: 140378 - protein, 9 aa, Homo sapiens
AFLPWHRLF

SEQ ID NO: 140379 - protein, 9 aa, Homo sapiens
FLPWHRLFL

SEQ ID NO: 140380 - protein, 9 aa, Homo sapiens
LPWHRLFLL

SEQ ID NO: 140381 - protein, 9 aa, Homo sapiens
PWHRLFLLR

SEQ ID NO: 140382 - protein, 9 aa, Homo sapiens
WHRLFLLRW

SEQ ID NO: 140383 - protein, 9 aa, Homo sapiens
HRLFLLRWE

SEQ ID NO: 140384 - protein, 9 aa, Homo sapiens
RLFLLRWEQ

SEQ ID NO: 140385 - protein, 9 aa, Homo sapiens
LFLLRWEQE

SEQ ID NO: 140386 - protein, 9 aa, Homo sapiens
FLLRWEQEI

SEQ ID NO: 140387 - protein, 9 aa, Homo sapiens
LLRWEQEIQ

SEQ ID NO: 140388 - protein, 9 aa, Homo sapiens
LRWEQEIQK

SEQ ID NO: 140389 - protein, 9 aa, Homo sapiens
RWEQEIQKL

SEQ ID NO: 140390 - protein, 9 aa, Homo sapiens
WEQEIQKLT

SEQ ID NO: 140391 - protein, 9 aa, Homo sapiens
EQEIQKLTG

SEQ ID NO: 140392 - protein, 9 aa, Homo sapiens
QEIQKLTGD

SEQ ID NO: 140393 - protein, 9 aa, Homo sapiens
EIQKLTGDE

SEQ ID NO: 140394 - protein, 9 aa, Homo sapiens
IQKLTGDEN

SEQ ID NO: 140395 - protein, 9 aa, Homo sapiens
QKLTGDENF

SEQ ID NO: 140396 - protein, 9 aa, Homo sapiens
KLTGDENFT

SEQ ID NO: 140397 - protein, 9 aa, Homo sapiens
LTGDENFTI

SEQ ID NO: 140398 - protein, 9 aa, Homo sapiens
TGDENFTIP

SEQ ID NO: 140399 - protein, 9 aa, Homo sapiens
GDENFTIPY

SEQ ID NO: 140400 - protein, 9 aa, Homo sapiens
DENFTIPYW

SEQ ID NO: 140401 - protein, 9 aa, Homo sapiens
ENFTIPYWD

SEQ ID NO: 140402 - protein, 9 aa, Homo sapiens
NFTIPYWDW

SEQ ID NO: 140403 - protein, 9 aa, Homo sapiens
FTIPYWDWR

SEQ ID NO: 140404 - protein, 9 aa, Homo sapiens
TIPYWDWRD

SEQ ID NO: 140405 - protein, 9 aa, Homo sapiens
IPYWDWRDA

SEQ ID NO: 140406 - protein, 9 aa, Homo sapiens
PYWDWRDAE

SEQ ID NO: 140407 - protein, 9 aa, Homo sapiens
YWDWRDAEK

SEQ ID NO: 140408 - protein, 9 aa, Homo sapiens
WDWRDAEKC

SEQ ID NO: 140409 - protein, 9 aa, Homo sapiens
DWRDAEKCD

SEQ ID NO: 140410 - protein, 9 aa, Homo sapiens
WRDAEKCDI

SEQ ID NO: 140411 - protein, 9 aa, Homo sapiens
RDAEKCDIC

SEQ ID NO: 140412 - protein, 9 aa, Homo sapiens
DAEKCDICT

SEQ ID NO: 140413 - protein, 9 aa, Homo sapiens
AEKCDICTD

SEQ ID NO: 140414 - protein, 9 aa, Homo sapiens
EKCDICTDE

SEQ ID NO: 140415 - protein, 9 aa, Homo sapiens
KCDICTDEY

SEQ ID NO: 140416 - protein, 9 aa, Homo sapiens
CDICTDEYM

SEQ ID NO: 140417 - protein, 9 aa, Homo sapiens
DICTDEYMG

SEQ ID NO: 140418 - protein, 9 aa, Homo sapiens
ICTDEYMGG

SEQ ID NO: 140419 - protein, 9 aa, Homo sapiens
CTDEYMGGQ

SEQ ID NO: 140420 - protein, 9 aa, Homo sapiens
TDEYMGGQH

SEQ ID NO: 140421 - protein, 9 aa, Homo sapiens
DEYMGGQHP

SEQ ID NO: 140422 - protein, 9 aa, Homo sapiens
EYMGGQHPT

SEQ ID NO: 140423 - protein, 9 aa, Homo sapiens
YMGGQHPTN

SEQ ID NO: 140424 - protein, 9 aa, Homo sapiens
MGGQHPTNP

SEQ ID NO: 140425 - protein, 9 aa, Homo sapiens
GGQHPTNPN

SEQ ID NO: 140426 - protein, 9 aa, Homo sapiens
GQHPTNPNL

SEQ ID NO: 140427 - protein, 9 aa, Homo sapiens
QHPTNPNLL

SEQ ID NO: 140428 - protein, 9 aa, Homo sapiens
HPTNPNLLS

SEQ ID NO: 140429 - protein, 9 aa, Homo sapiens
PTNPNLLSP

SEQ ID NO: 140430 - protein, 9 aa, Homo sapiens
TNPNLLSPA

SEQ ID NO: 140431 - protein, 9 aa, Homo sapiens
NPNLLSPAS

SEQ ID NO: 140432 - protein, 9 aa, Homo sapiens
PNLLSPASF

SEQ ID NO: 140433 - protein, 9 aa, Homo sapiens
NLLSPASFF

SEQ ID NO: 140434 - protein, 9 aa, Homo sapiens
LLSPASFFS

SEQ ID NO: 140435 - protein, 9 aa, Homo sapiens
LSPASFFSS

SEQ ID NO: 140436 - protein, 9 aa, Homo sapiens
SPASFFSSW

SEQ ID NO: 140437 - protein, 9 aa, Homo sapiens
PASFFSSWQ

SEQ ID NO: 140438 - protein, 9 aa, Homo sapiens
ASFFSSWQI

SEQ ID NO: 140439 - protein, 9 aa, Homo sapiens
SFFSSWQIV

SEQ ID NO: 140440 - protein, 9 aa, Homo sapiens
FFSSWQIVC

SEQ ID NO: 140441 - protein, 9 aa, Homo sapiens
FSSWQIVCS

SEQ ID NO: 140442 - protein, 9 aa, Homo sapiens
SSWQIVCSR

SEQ ID NO: 140443 - protein, 9 aa, Homo sapiens
SWQIVCSRL

SEQ ID NO: 140444 - protein, 9 aa, Homo sapiens
WQIVCSRLE

SEQ ID NO: 140445 - protein, 9 aa, Homo sapiens
QIVCSRLEE

SEQ ID NO: 140446 - protein, 9 aa, Homo sapiens
IVCSRLEEY

SEQ ID NO: 140447 - protein, 9 aa, Homo sapiens
VCSRLEEYN

SEQ ID NO: 140448 - protein, 9 aa, Homo sapiens
CSRLEEYNS

SEQ ID NO: 140449 - protein, 9 aa, Homo sapiens
SRLEEYNSH

SEQ ID NO: 140450 - protein, 9 aa, Homo sapiens
RLEEYNSHQ

SEQ ID NO: 140451 - protein, 9 aa, Homo sapiens
LEEYNSHQS

SEQ ID NO: 140452 - protein, 9 aa, Homo sapiens
EEYNSHQSL

SEQ ID NO: 140453 - protein, 9 aa, Homo sapiens
EYNSHQSLC

SEQ ID NO: 140454 - protein, 9 aa, Homo sapiens
YNSHQSLCN

SEQ ID NO: 140455 - protein, 9 aa, Homo sapiens
NSHQSLCNG

SEQ ID NO: 140456 - protein, 9 aa, Homo sapiens
SHQSLCNGT

SEQ ID NO: 140457 - protein, 9 aa, Homo sapiens
HQSLCNGTP

SEQ ID NO: 140458 - protein, 9 aa, Homo sapiens
QSLCNGTPE

SEQ ID NO: 140459 - protein, 9 aa, Homo sapiens
SLCNGTPEG

SEQ ID NO: 140460 - protein, 9 aa, Homo sapiens
LCNGTPEGP

SEQ ID NO: 140461 - protein, 9 aa, Homo sapiens
CNGTPEGPL

SEQ ID NO: 140462 - protein, 9 aa, Homo sapiens
NGTPEGPLR

SEQ ID NO: 140463 - protein, 9 aa, Homo sapiens
GTPEGPLRR

SEQ ID NO: 140464 - protein, 9 aa, Homo sapiens
TPEGPLRRN

SEQ ID NO: 140465 - protein, 9 aa, Homo sapiens
PEGPLRRNP

SEQ ID NO: 140466 - protein, 9 aa, Homo sapiens
EGPLRRNPG

SEQ ID NO: 140467 - protein, 9 aa, Homo sapiens
GPLRRNPGN

SEQ ID NO: 140468 - protein, 9 aa, Homo sapiens
PLRRNPGNH

SEQ ID NO: 140469 - protein, 9 aa, Homo sapiens
LRRNPGNHD

SEQ ID NO: 140470 - protein, 9 aa, Homo sapiens
RRNPGNHDK

SEQ ID NO: 140471 - protein, 9 aa, Homo sapiens
RNPGNHDKS

SEQ ID NO: 140472 - protein, 9 aa, Homo sapiens
NPGNHDKSR

SEQ ID NO: 140473 - protein, 9 aa, Homo sapiens
PGNHDKSRT

SEQ ID NO: 140474 - protein, 9 aa, Homo sapiens
GNHDKSRTP

SEQ ID NO: 140475 - protein, 9 aa, Homo sapiens
NHDKSRTPR

SEQ ID NO: 140476 - protein, 9 aa, Homo sapiens
HDKSRTPRL

SEQ ID NO: 140477 - protein, 9 aa, Homo sapiens
DKSRTPRLP

SEQ ID NO: 140478 - protein, 9 aa, Homo sapiens
KSRTPRLPS

SEQ ID NO: 140479 - protein, 9 aa, Homo sapiens
SRTPRLPSS

SEQ ID NO: 140480 - protein, 9 aa, Homo sapiens
RTPRLPSSA

SEQ ID NO: 140481 - protein, 9 aa, Homo sapiens
TPRLPSSAD

SEQ ID NO: 140482 - protein, 9 aa, Homo sapiens
PRLPSSADV

SEQ ID NO: 140483 - protein, 9 aa, Homo sapiens
RLPSSADVE

SEQ ID NO: 140484 - protein, 9 aa, Homo sapiens
LPSSADVEF

SEQ ID NO: 140485 - protein, 9 aa, Homo sapiens
PSSADVEFC

SEQ ID NO: 140486 - protein, 9 aa, Homo sapiens
SSADVEFCL

SEQ ID NO: 140487 - protein, 9 aa, Homo sapiens
SADVEFCLS

SEQ ID NO: 140488 - protein, 9 aa, Homo sapiens
ADVEFCLSL

SEQ ID NO: 140489 - protein, 9 aa, Homo sapiens
DVEFCLSLT

SEQ ID NO: 140490 - protein, 9 aa, Homo sapiens
VEFCLSLTQ

SEQ ID NO: 140491 - protein, 9 aa, Homo sapiens
EFCLSLTQY

SEQ ID NO: 140492 - protein, 9 aa, Homo sapiens
FCLSLTQYE

SEQ ID NO: 140493 - protein, 9 aa, Homo sapiens
CLSLTQYES

SEQ ID NO: 140494 - protein, 9 aa, Homo sapiens
LSLTQYESG

SEQ ID NO: 140495 - protein, 9 aa, Homo sapiens
SLTQYESGS

SEQ ID NO: 140496 - protein, 9 aa, Homo sapiens
LTQYESGSM

SEQ ID NO: 140497 - protein, 9 aa, Homo sapiens
TQYESGSMD

SEQ ID NO: 140498 - protein, 9 aa, Homo sapiens
QYESGSMDK

SEQ ID NO: 140499 - protein, 9 aa, Homo sapiens
YESGSMDKA

SEQ ID NO: 140500 - protein, 9 aa, Homo sapiens
ESGSMDKAA

SEQ ID NO: 140501 - protein, 9 aa, Homo sapiens
SGSMDKAAN

SEQ ID NO: 140502 - protein, 9 aa, Homo sapiens
GSMDKAANF

SEQ ID NO: 140503 - protein, 9 aa, Homo sapiens
SMDKAANFS

SEQ ID NO: 140504 - protein, 9 aa, Homo sapiens
MDKAANFSF

SEQ ID NO: 140505 - protein, 9 aa, Homo sapiens
DKAANFSFR

SEQ ID NO: 140506 - protein, 9 aa, Homo sapiens
KAANFSFRN

SEQ ID NO: 140507 - protein, 9 aa, Homo sapiens
AANFSFRNT

SEQ ID NO: 140508 - protein, 9 aa, Homo sapiens
ANFSFRNTL

SEQ ID NO: 140509 - protein, 9 aa, Homo sapiens
NFSFRNTLE

SEQ ID NO: 140510 - protein, 9 aa, Homo sapiens
FSFRNTLEG

SEQ ID NO: 140511 - protein, 9 aa, Homo sapiens
SFRNTLEGF

SEQ ID NO: 140512 - protein, 9 aa, Homo sapiens
FRNTLEGFA

SEQ ID NO: 140513 - protein, 9 aa, Homo sapiens
RNTLEGFAS

SEQ ID NO: 140514 - protein, 9 aa, Homo sapiens
NTLEGFASP

SEQ ID NO: 140515 - protein, 9 aa, Homo sapiens
TLEGFASPL

SEQ ID NO: 140516 - protein, 9 aa, Homo sapiens
LEGFASPLT

SEQ ID NO: 140517 - protein, 9 aa, Homo sapiens
EGFASPLTG

SEQ ID NO: 140518 - protein, 9 aa, Homo sapiens
GFASPLTGI

SEQ ID NO: 140519 - protein, 9 aa, Homo sapiens
FASPLTGIA

SEQ ID NO: 140520 - protein, 9 aa, Homo sapiens
ASPLTGIAD

SEQ ID NO: 140521 - protein, 9 aa, Homo sapiens
SPLTGIADA

SEQ ID NO: 140522 - protein, 9 aa, Homo sapiens
PLTGIADAS

SEQ ID NO: 140523 - protein, 9 aa, Homo sapiens
LTGIADASQ

SEQ ID NO: 140524 - protein, 9 aa, Homo sapiens
TGIADASQS

SEQ ID NO: 140525 - protein, 9 aa, Homo sapiens
GIADASQSS

SEQ ID NO: 140526 - protein, 9 aa, Homo sapiens
IADASQSSM

SEQ ID NO: 140527 - protein, 9 aa, Homo sapiens
ADASQSSMH

SEQ ID NO: 140528 - protein, 9 aa, Homo sapiens
DASQSSMHN

SEQ ID NO: 140529 - protein, 9 aa, Homo sapiens
ASQSSMHNA

SEQ ID NO: 140530 - protein, 9 aa, Homo sapiens
SQSSMHNAL

SEQ ID NO: 140531 - protein, 9 aa, Homo sapiens
QSSMHNALH

SEQ ID NO: 140532 - protein, 9 aa, Homo sapiens
SSMHNALHI

SEQ ID NO: 140533 - protein, 9 aa, Homo sapiens
SMHNALHIY

SEQ ID NO: 140534 - protein, 9 aa, Homo sapiens
MHNALHIYM

SEQ ID NO: 140535 - protein, 9 aa, Homo sapiens
HNALHIYMN

SEQ ID NO: 140536 - protein, 9 aa, Homo sapiens
NALHIYMNG

SEQ ID NO: 140537 - protein, 9 aa, Homo sapiens
ALHIYMNGT

SEQ ID NO: 140538 - protein, 9 aa, Homo sapiens
LHIYMNGTM

SEQ ID NO: 140539 - protein, 9 aa, Homo sapiens
HIYMNGTMS

SEQ ID NO: 140540 - protein, 9 aa, Homo sapiens
IYMNGTMSQ

SEQ ID NO: 140541 - protein, 9 aa, Homo sapiens
YMNGTMSQV

SEQ ID NO: 140542 - protein, 9 aa, Homo sapiens
MNGTMSQVQ

SEQ ID NO: 140543 - protein, 9 aa, Homo sapiens
NGTMSQVQG

SEQ ID NO: 140544 - protein, 9 aa, Homo sapiens
GTMSQVQGS

SEQ ID NO: 140545 - protein, 9 aa, Homo sapiens
TMSQVQGSA

SEQ ID NO: 140546 - protein, 9 aa, Homo sapiens
MSQVQGSAN

SEQ ID NO: 140547 - protein, 9 aa, Homo sapiens
SQVQGSAND

SEQ ID NO: 140548 - protein, 9 aa, Homo sapiens
QVQGSANDP

SEQ ID NO: 140549 - protein, 9 aa, Homo sapiens
VQGSANDPI

SEQ ID NO: 140550 - protein, 9 aa, Homo sapiens
QGSANDPIF

SEQ ID NO: 140551 - protein, 9 aa, Homo sapiens
GSANDPIFL

SEQ ID NO: 140552 - protein, 9 aa, Homo sapiens
SANDPIFLL

SEQ ID NO: 140553 - protein, 9 aa, Homo sapiens
ANDPIFLLH

SEQ ID NO: 140554 - protein, 9 aa, Homo sapiens
NDPIFLLHH

SEQ ID NO: 140555 - protein, 9 aa, Homo sapiens
DPIFLLHHA

SEQ ID NO: 140556 - protein, 9 aa, Homo sapiens
PIFLLHHAF

SEQ ID NO: 140557 - protein, 9 aa, Homo sapiens
IFLLHHAFV

SEQ ID NO: 140558 - protein, 9 aa, Homo sapiens
FLLHHAFVD

SEQ ID NO: 140559 - protein, 9 aa, Homo sapiens
LLHHAFVDS

SEQ ID NO: 140560 - protein, 9 aa, Homo sapiens
LHHAFVDSI

SEQ ID NO: 140561 - protein, 9 aa, Homo sapiens
HHAFVDSIF

SEQ ID NO: 140562 - protein, 9 aa, Homo sapiens
HAFVDSIFE

SEQ ID NO: 140563 - protein, 9 aa, Homo sapiens
AFVDSIFEQ

SEQ ID NO: 140564 - protein, 9 aa, Homo sapiens
FVDSIFEQW

SEQ ID NO: 140565 - protein, 9 aa, Homo sapiens
VDSIFEQWL

SEQ ID NO: 140566 - protein, 9 aa, Homo sapiens
DSIFEQWLQ

SEQ ID NO: 140567 - protein, 9 aa, Homo sapiens
SIFEQWLQR

SEQ ID NO: 140568 - protein, 9 aa, Homo sapiens
IFEQWLQRH

SEQ ID NO: 140569 - protein, 9 aa, Homo sapiens
FEQWLQRHR

SEQ ID NO: 140570 - protein, 9 aa, Homo sapiens
EQWLQRHRP

SEQ ID NO: 140571 - protein, 9 aa, Homo sapiens
QWLQRHRPL

SEQ ID NO: 140572 - protein, 9 aa, Homo sapiens
WLQRHRPLQ

SEQ ID NO: 140573 - protein, 9 aa, Homo sapiens
LQRHRPLQE

SEQ ID NO: 140574 - protein, 9 aa, Homo sapiens
QRHRPLQEV

SEQ ID NO: 140575 - protein, 9 aa, Homo sapiens
RHRPLQEVY

SEQ ID NO: 140576 - protein, 9 aa, Homo sapiens
HRPLQEVYP

SEQ ID NO: 140577 - protein, 9 aa, Homo sapiens
RPLQEVYPE

SEQ ID NO: 140578 - protein, 9 aa, Homo sapiens
PLQEVYPEA

SEQ ID NO: 140579 - protein, 9 aa, Homo sapiens
LQEVYPEAN

SEQ ID NO: 140580 - protein, 9 aa, Homo sapiens
QEVYPEANA

SEQ ID NO: 140581 - protein, 9 aa, Homo sapiens
EVYPEANAP

SEQ ID NO: 140582 - protein, 9 aa, Homo sapiens
VYPEANAPI

SEQ ID NO: 140583 - protein, 9 aa, Homo sapiens
YPEANAPIG

SEQ ID NO: 140584 - protein, 9 aa, Homo sapiens
PEANAPIGH

SEQ ID NO: 140585 - protein, 9 aa, Homo sapiens
EANAPIGHN

SEQ ID NO: 140586 - protein, 9 aa, Homo sapiens
ANAPIGHNR

SEQ ID NO: 140587 - protein, 9 aa, Homo sapiens
NAPIGHNRE

SEQ ID NO: 140588 - protein, 9 aa, Homo sapiens
APIGHNRES

SEQ ID NO: 140589 - protein, 9 aa, Homo sapiens
PIGHNRESY

SEQ ID NO: 140590 - protein, 9 aa, Homo sapiens
IGHNRESYM

SEQ ID NO: 140591 - protein, 9 aa, Homo sapiens
GHNRESYMV

SEQ ID NO: 140592 - protein, 9 aa, Homo sapiens
HNRESYMVP

SEQ ID NO: 140593 - protein, 9 aa, Homo sapiens
NRESYMVPF

SEQ ID NO: 140594 - protein, 9 aa, Homo sapiens
RESYMVPFI

SEQ ID NO: 140595 - protein, 9 aa, Homo sapiens
ESYMVPFIP

SEQ ID NO: 140596 - protein, 9 aa, Homo sapiens
SYMVPFIPL

SEQ ID NO: 140597 - protein, 9 aa, Homo sapiens
YMVPFIPLY

SEQ ID NO: 140598 - protein, 9 aa, Homo sapiens
MVPFIPLYR

SEQ ID NO: 140599 - protein, 9 aa, Homo sapiens
VPFIPLYRN

SEQ ID NO: 140600 - protein, 9 aa, Homo sapiens
PFIPLYRNG

SEQ ID NO: 140601 - protein, 9 aa, Homo sapiens
FIPLYRNGD

SEQ ID NO: 140602 - protein, 9 aa, Homo sapiens
IPLYRNGDF

SEQ ID NO: 140603 - protein, 9 aa, Homo sapiens
PLYRNGDFF

SEQ ID NO: 140604 - protein, 9 aa, Homo sapiens
LYRNGDFFI

SEQ ID NO: 140605 - protein, 9 aa, Homo sapiens
YRNGDFFIS

SEQ ID NO: 140606 - protein, 9 aa, Homo sapiens
RNGDFFISS

SEQ ID NO: 140607 - protein, 9 aa, Homo sapiens
NGDFFISSK

SEQ ID NO: 140608 - protein, 9 aa, Homo sapiens
GDFFISSKD

SEQ ID NO: 140609 - protein, 9 aa, Homo sapiens
DFFISSKDL

SEQ ID NO: 140610 - protein, 9 aa, Homo sapiens
FFISSKDLG

SEQ ID NO: 140611 - protein, 9 aa, Homo sapiens
FISSKDLGY

SEQ ID NO: 140612 - protein, 9 aa, Homo sapiens
ISSKDLGYD

SEQ ID NO: 140613 - protein, 9 aa, Homo sapiens
SSKDLGYDY

SEQ ID NO: 140614 - protein, 9 aa, Homo sapiens
SKDLGYDYS

SEQ ID NO: 140615 - protein, 9 aa, Homo sapiens
KDLGYDYSY

SEQ ID NO: 140616 - protein, 9 aa, Homo sapiens
DLGYDYSYL

SEQ ID NO: 140617 - protein, 9 aa, Homo sapiens
LGYDYSYLQ

SEQ ID NO: 140618 - protein, 9 aa, Homo sapiens
GYDYSYLQD

SEQ ID NO: 140619 - protein, 9 aa, Homo sapiens
YDYSYLQDS

SEQ ID NO: 140620 - protein, 9 aa, Homo sapiens
DYSYLQDSD

SEQ ID NO: 140621 - protein, 9 aa, Homo sapiens
YSYLQDSDP

SEQ ID NO: 140622 - protein, 9 aa, Homo sapiens
SYLQDSDPD

SEQ ID NO: 140623 - protein, 9 aa, Homo sapiens
YLQDSDPDS

SEQ ID NO: 140624 - protein, 9 aa, Homo sapiens
LQDSDPDSF

SEQ ID NO: 140625 - protein, 9 aa, Homo sapiens
QDSDPDSFQ

SEQ ID NO: 140626 - protein, 9 aa, Homo sapiens
DSDPDSFQD

SEQ ID NO: 140627 - protein, 9 aa, Homo sapiens
SDPDSFQDY

SEQ ID NO: 140628 - protein, 9 aa, Homo sapiens
DPDSFQDYI

SEQ ID NO: 140629 - protein, 9 aa, Homo sapiens
PDSFQDYIK

SEQ ID NO: 140630 - protein, 9 aa, Homo sapiens
DSFQDYIKS

SEQ ID NO: 140631 - protein, 9 aa, Homo sapiens
SFQDYIKSY

SEQ ID NO: 140632 - protein, 9 aa, Homo sapiens
FQDYIKSYL

SEQ ID NO: 140633 - protein, 9 aa, Homo sapiens
QDYIKSYLE

SEQ ID NO: 140634 - protein, 9 aa, Homo sapiens
DYIKSYLEQ

SEQ ID NO: 140635 - protein, 9 aa, Homo sapiens
YIKSYLEQA

SEQ ID NO: 140636 - protein, 9 aa, Homo sapiens
IKSYLEQAS

SEQ ID NO: 140637 - protein, 9 aa, Homo sapiens
KSYLEQASR

SEQ ID NO: 140638 - protein, 9 aa, Homo sapiens
SYLEQASRI

SEQ ID NO: 140639 - protein, 9 aa, Homo sapiens
YLEQASRIW

SEQ ID NO: 140640 - protein, 9 aa, Homo sapiens
LEQASRIWS

SEQ ID NO: 140641 - protein, 9 aa, Homo sapiens
EQASRIWSW

SEQ ID NO: 140642 - protein, 9 aa, Homo sapiens
QASRIWSWL

SEQ ID NO: 140643 - protein, 9 aa, Homo sapiens
ASRIWSWLL

SEQ ID NO: 140644 - protein, 9 aa, Homo sapiens
SRIWSWLLG

SEQ ID NO: 140645 - protein, 9 aa, Homo sapiens
RIWSWLLGA

SEQ ID NO: 140646 - protein, 9 aa, Homo sapiens
IWSWLLGAA

SEQ ID NO: 140647 - protein, 9 aa, Homo sapiens
WSWLLGAAM

SEQ ID NO: 140648 - protein, 9 aa, Homo sapiens
SWLLGAAMV

SEQ ID NO: 140649 - protein, 9 aa, Homo sapiens
WLLGAAMVG

SEQ ID NO: 140650 - protein, 9 aa, Homo sapiens
LLGAAMVGA

SEQ ID NO: 140651 - protein, 9 aa, Homo sapiens
LGAAMVGAV

SEQ ID NO: 140652 - protein, 9 aa, Homo sapiens
GAAMVGAVL

SEQ ID NO: 140653 - protein, 9 aa, Homo sapiens
AAMVGAVLT

SEQ ID NO: 140654 - protein, 9 aa, Homo sapiens
AMVGAVLTA

SEQ ID NO: 140655 - protein, 9 aa, Homo sapiens
MVGAVLTAL

SEQ ID NO: 140656 - protein, 9 aa, Homo sapiens
VGAVLTALL

SEQ ID NO: 140657 - protein, 9 aa, Homo sapiens
GAVLTALLA

SEQ ID NO: 140658 - protein, 9 aa, Homo sapiens
AVLTALLAG

SEQ ID NO: 140659 - protein, 9 aa, Homo sapiens
VLTALLAGL

SEQ ID NO: 140660 - protein, 9 aa, Homo sapiens
LTALLAGLV

SEQ ID NO: 140661 - protein, 9 aa, Homo sapiens
TALLAGLVS

SEQ ID NO: 140662 - protein, 9 aa, Homo sapiens
ALLAGLVSL

SEQ ID NO: 140663 - protein, 9 aa, Homo sapiens
LLAGLVSLL

SEQ ID NO: 140664 - protein, 9 aa, Homo sapiens
LAGLVSLLC

SEQ ID NO: 140665 - protein, 9 aa, Homo sapiens
AGLVSLLCR

SEQ ID NO: 140666 - protein, 9 aa, Homo sapiens
GLVSLLCRH

SEQ ID NO: 140667 - protein, 9 aa, Homo sapiens
LVSLLCRHK

SEQ ID NO: 140668 - protein, 9 aa, Homo sapiens
VSLLCRHKR

SEQ ID NO: 140669 - protein, 9 aa, Homo sapiens
SLLCRHKRK

SEQ ID NO: 140670 - protein, 9 aa, Homo sapiens
LLCRHKRKQ

SEQ ID NO: 140671 - protein, 9 aa, Homo sapiens
LCRHKRKQL

SEQ ID NO: 140672 - protein, 9 aa, Homo sapiens
CRHKRKQLP

SEQ ID NO: 140673 - protein, 9 aa, Homo sapiens
RHKRKQLPE

SEQ ID NO: 140674 - protein, 9 aa, Homo sapiens
HKRKQLPEE

SEQ ID NO: 140675 - protein, 9 aa, Homo sapiens
KRKQLPEEK

SEQ ID NO: 140676 - protein, 9 aa, Homo sapiens
RKQLPEEKQ

SEQ ID NO: 140677 - protein, 9 aa, Homo sapiens
KQLPEEKQP

SEQ ID NO: 140678 - protein, 9 aa, Homo sapiens
QLPEEKQPL

SEQ ID NO: 140679 - protein, 9 aa, Homo sapiens
LPEEKQPLL

SEQ ID NO: 140680 - protein, 9 aa, Homo sapiens
PEEKQPLLM

SEQ ID NO: 140681 - protein, 9 aa, Homo sapiens
EEKQPLLME

SEQ ID NO: 140682 - protein, 9 aa, Homo sapiens
EKQPLLMEK

SEQ ID NO: 140683 - protein, 9 aa, Homo sapiens
KQPLLMEKE

SEQ ID NO: 140684 - protein, 9 aa, Homo sapiens
QPLLMEKED

SEQ ID NO: 140685 - protein, 9 aa, Homo sapiens
PLLMEKEDY

SEQ ID NO: 140686 - protein, 9 aa, Homo sapiens
LLMEKEDYH

SEQ ID NO: 140687 - protein, 9 aa, Homo sapiens
LMEKEDYHS

SEQ ID NO: 140688 - protein, 9 aa, Homo sapiens
MEKEDYHSL

SEQ ID NO: 140689 - protein, 9 aa, Homo sapiens
EKEDYHSLY

SEQ ID NO: 140690 - protein, 9 aa, Homo sapiens
KEDYHSLYQ

SEQ ID NO: 140691 - protein, 9 aa, Homo sapiens
EDYHSLYQS

SEQ ID NO: 140692 - protein, 9 aa, Homo sapiens
DYHSLYQSH

SEQ ID NO: 140693 - protein, 9 aa, Homo sapiens
YHSLYQSHL

SEQ ID NO: 140694 - protein, 9 aa, Homo sapiens
MQDPASTCV

SEQ ID NO: 140695 - protein, 9 aa, Homo sapiens
QDPASTCVP

SEQ ID NO: 140696 - protein, 9 aa, Homo sapiens
DPASTCVPE

SEQ ID NO: 140697 - protein, 9 aa, Homo sapiens
PASTCVPEP

SEQ ID NO: 140698 - protein, 9 aa, Homo sapiens
ASTCVPEPA

SEQ ID NO: 140699 - protein, 9 aa, Homo sapiens
STCVPEPAS

SEQ ID NO: 140700 - protein, 9 aa, Homo sapiens
TCVPEPASQ

SEQ ID NO: 140701 - protein, 9 aa, Homo sapiens
CVPEPASQH

SEQ ID NO: 140702 - protein, 9 aa, Homo sapiens
VPEPASQHT

SEQ ID NO: 140703 - protein, 9 aa, Homo sapiens
PEPASQHTL

SEQ ID NO: 140704 - protein, 9 aa, Homo sapiens
EPASQHTLR

SEQ ID NO: 140705 - protein, 9 aa, Homo sapiens
PASQHTLRS

SEQ ID NO: 140706 - protein, 9 aa, Homo sapiens
ASQHTLRSG

SEQ ID NO: 140707 - protein, 9 aa, Homo sapiens
SQHTLRSGP

SEQ ID NO: 140708 - protein, 9 aa, Homo sapiens
QHTLRSGPG

SEQ ID NO: 140709 - protein, 9 aa, Homo sapiens
HTLRSGPGC

SEQ ID NO: 140710 - protein, 9 aa, Homo sapiens
TLRSGPGCL

SEQ ID NO: 140711 - protein, 9 aa, Homo sapiens
LRSGPGCLQ

SEQ ID NO: 140712 - protein, 9 aa, Homo sapiens
RSGPGCLQQ

SEQ ID NO: 140713 - protein, 9 aa, Homo sapiens
SGPGCLQQP

SEQ ID NO: 140714 - protein, 9 aa, Homo sapiens
GPGCLQQPE

SEQ ID NO: 140715 - protein, 9 aa, Homo sapiens
PGCLQQPEQ

SEQ ID NO: 140716 - protein, 9 aa, Homo sapiens
GCLQQPEQQ

SEQ ID NO: 140717 - protein, 9 aa, Homo sapiens
CLQQPEQQG

SEQ ID NO: 140718 - protein, 9 aa, Homo sapiens
LQQPEQQGV

SEQ ID NO: 140719 - protein, 9 aa, Homo sapiens
QQPEQQGVR

SEQ ID NO: 140720 - protein, 9 aa, Homo sapiens
QPEQQGVRD

SEQ ID NO: 140721 - protein, 9 aa, Homo sapiens
PEQQGVRDP

SEQ ID NO: 140722 - protein, 9 aa, Homo sapiens
EQQGVRDPG

SEQ ID NO: 140723 - protein, 9 aa, Homo sapiens
QQGVRDPGG

SEQ ID NO: 140724 - protein, 9 aa, Homo sapiens
QGVRDPGGI

SEQ ID NO: 140725 - protein, 9 aa, Homo sapiens
GVRDPGGIW

SEQ ID NO: 140726 - protein, 9 aa, Homo sapiens
VRDPGGIWA

SEQ ID NO: 140727 - protein, 9 aa, Homo sapiens
RDPGGIWAK

SEQ ID NO: 140728 - protein, 9 aa, Homo sapiens
DPGGIWAKL

SEQ ID NO: 140729 - protein, 9 aa, Homo sapiens
PGGIWAKLG

SEQ ID NO: 140730 - protein, 9 aa, Homo sapiens
GGIWAKLGA

SEQ ID NO: 140731 - protein, 9 aa, Homo sapiens
GIWAKLGAA

SEQ ID NO: 140732 - protein, 9 aa, Homo sapiens
IWAKLGAAE

SEQ ID NO: 140733 - protein, 9 aa, Homo sapiens
WAKLGAAEA

SEQ ID NO: 140734 - protein, 9 aa, Homo sapiens
AKLGAAEAS

SEQ ID NO: 140735 - protein, 9 aa, Homo sapiens
KLGAAEASA

SEQ ID NO: 140736 - protein, 9 aa, Homo sapiens
LGAAEASAE

SEQ ID NO: 140737 - protein, 9 aa, Homo sapiens
GAAEASAER

SEQ ID NO: 140738 - protein, 9 aa, Homo sapiens
AAEASAERL

SEQ ID NO: 140739 - protein, 9 aa, Homo sapiens
AEASAERLQ

SEQ ID NO: 140740 - protein, 9 aa, Homo sapiens
EASAERLQG

SEQ ID NO: 140741 - protein, 9 aa, Homo sapiens
ASAERLQGR

SEQ ID NO: 140742 - protein, 9 aa, Homo sapiens
SAERLQGRR

SEQ ID NO: 140743 - protein, 9 aa, Homo sapiens
AERLQGRRS

SEQ ID NO: 140744 - protein, 9 aa, Homo sapiens
ERLQGRRSR

SEQ ID NO: 140745 - protein, 9 aa, Homo sapiens
RLQGRRSRG

SEQ ID NO: 140746 - protein, 9 aa, Homo sapiens
LQGRRSRGA

SEQ ID NO: 140747 - protein, 9 aa, Homo sapiens
QGRRSRGAS

SEQ ID NO: 140748 - protein, 9 aa, Homo sapiens
GRRSRGASG

SEQ ID NO: 140749 - protein, 9 aa, Homo sapiens
RRSRGASGS

SEQ ID NO: 140750 - protein, 9 aa, Homo sapiens
RSRGASGSE

SEQ ID NO: 140751 - protein, 9 aa, Homo sapiens
SRGASGSEP

SEQ ID NO: 140752 - protein, 9 aa, Homo sapiens
RGASGSEPQ

SEQ ID NO: 140753 - protein, 9 aa, Homo sapiens
GASGSEPQQ

SEQ ID NO: 140754 - protein, 9 aa, Homo sapiens
ASGSEPQQM

SEQ ID NO: 140755 - protein, 9 aa, Homo sapiens
SGSEPQQMG

SEQ ID NO: 140756 - protein, 9 aa, Homo sapiens
GSEPQQMGS

SEQ ID NO: 140757 - protein, 9 aa, Homo sapiens
SEPQQMGSD

SEQ ID NO: 140758 - protein, 9 aa, Homo sapiens
EPQQMGSDV

SEQ ID NO: 140759 - protein, 9 aa, Homo sapiens
PQQMGSDVR

SEQ ID NO: 140760 - protein, 9 aa, Homo sapiens
QQMGSDVRD

SEQ ID NO: 140761 - protein, 9 aa, Homo sapiens
QMGSDVRDL

SEQ ID NO: 140762 - protein, 9 aa, Homo sapiens
MGSDVRDLN

SEQ ID NO: 140763 - protein, 9 aa, Homo sapiens
GSDVRDLNA

SEQ ID NO: 140764 - protein, 9 aa, Homo sapiens
SDVRDLNAL

SEQ ID NO: 140765 - protein, 9 aa, Homo sapiens
DVRDLNALL

SEQ ID NO: 140766 - protein, 9 aa, Homo sapiens
VRDLNALLP

SEQ ID NO: 140767 - protein, 9 aa, Homo sapiens
RDLNALLPA

SEQ ID NO: 140768 - protein, 9 aa, Homo sapiens
DLNALLPAV

SEQ ID NO: 140769 - protein, 9 aa, Homo sapiens
LNALLPAVP

SEQ ID NO: 140770 - protein, 9 aa, Homo sapiens
NALLPAVPS

SEQ ID NO: 140771 - protein, 9 aa, Homo sapiens
ALLPAVPSL

SEQ ID NO: 140772 - protein, 9 aa, Homo sapiens
LLPAVPSLG

SEQ ID NO: 140773 - protein, 9 aa, Homo sapiens
LPAVPSLGG

SEQ ID NO: 140774 - protein, 9 aa, Homo sapiens
PAVPSLGGG

SEQ ID NO: 140775 - protein, 9 aa, Homo sapiens
AVPSLGGGG

SEQ ID NO: 140776 - protein, 9 aa, Homo sapiens
VPSLGGGGG

SEQ ID NO: 140777 - protein, 9 aa, Homo sapiens
PSLGGGGGC

SEQ ID NO: 140778 - protein, 9 aa, Homo sapiens
SLGGGGGCA

SEQ ID NO: 140779 - protein, 9 aa, Homo sapiens
LGGGGGCAL

SEQ ID NO: 140780 - protein, 9 aa, Homo sapiens
GGGGGCALP

SEQ ID NO: 140781 - protein, 9 aa, Homo sapiens
GGGGCALPV

SEQ ID NO: 140782 - protein, 9 aa, Homo sapiens
GGGCALPVS

SEQ ID NO: 140783 - protein, 9 aa, Homo sapiens
GGCALPVSG

SEQ ID NO: 140784 - protein, 9 aa, Homo sapiens
GCALPVSGA

SEQ ID NO: 140785 - protein, 9 aa, Homo sapiens
CALPVSGAA

SEQ ID NO: 140786 - protein, 9 aa, Homo sapiens
ALPVSGAAQ

SEQ ID NO: 140787 - protein, 9 aa, Homo sapiens
LPVSGAAQW

SEQ ID NO: 140788 - protein, 9 aa, Homo sapiens
PVSGAAQWA

SEQ ID NO: 140789 - protein, 9 aa, Homo sapiens
VSGAAQWAP

SEQ ID NO: 140790 - protein, 9 aa, Homo sapiens
SGAAQWAPV

SEQ ID NO: 140791 - protein, 9 aa, Homo sapiens
GAAQWAPVL

SEQ ID NO: 140792 - protein, 9 aa, Homo sapiens
AAQWAPVLD

SEQ ID NO: 140793 - protein, 9 aa, Homo sapiens
AQWAPVLDF

SEQ ID NO: 140794 - protein, 9 aa, Homo sapiens
QWAPVLDFA

SEQ ID NO: 140795 - protein, 9 aa, Homo sapiens
WAPVLDFAP

SEQ ID NO: 140796 - protein, 9 aa, Homo sapiens
APVLDFAPP

SEQ ID NO: 140797 - protein, 9 aa, Homo sapiens
PVLDFAPPG

SEQ ID NO: 140798 - protein, 9 aa, Homo sapiens
VLDFAPPGA

SEQ ID NO: 140799 - protein, 9 aa, Homo sapiens
LDFAPPGAS

SEQ ID NO: 140800 - protein, 9 aa, Homo sapiens
DFAPPGASA

SEQ ID NO: 140801 - protein, 9 aa, Homo sapiens
FAPPGASAY

SEQ ID NO: 140802 - protein, 9 aa, Homo sapiens
APPGASAYG

SEQ ID NO: 140803 - protein, 9 aa, Homo sapiens
PPGASAYGS

SEQ ID NO: 140804 - protein, 9 aa, Homo sapiens
PGASAYGSL

SEQ ID NO: 140805 - protein, 9 aa, Homo sapiens
GASAYGSLG

SEQ ID NO: 140806 - protein, 9 aa, Homo sapiens
ASAYGSLGG

SEQ ID NO: 140807 - protein, 9 aa, Homo sapiens
SAYGSLGGP

SEQ ID NO: 140808 - protein, 9 aa, Homo sapiens
AYGSLGGPA

SEQ ID NO: 140809 - protein, 9 aa, Homo sapiens
YGSLGGPAP

SEQ ID NO: 140810 - protein, 9 aa, Homo sapiens
GSLGGPAPP

SEQ ID NO: 140811 - protein, 9 aa, Homo sapiens
SLGGPAPPP

SEQ ID NO: 140812 - protein, 9 aa, Homo sapiens
LGGPAPPPA

SEQ ID NO: 140813 - protein, 9 aa, Homo sapiens
GGPAPPPAP

SEQ ID NO: 140814 - protein, 9 aa, Homo sapiens
GPAPPPAPP

SEQ ID NO: 140815 - protein, 9 aa, Homo sapiens
PAPPPAPPP

SEQ ID NO: 140816 - protein, 9 aa, Homo sapiens
APPPAPPPP

SEQ ID NO: 140817 - protein, 9 aa, Homo sapiens
PPPAPPPPP

SEQ ID NO: 140818 - protein, 9 aa, Homo sapiens
PPAPPPPPP

SEQ ID NO: 140819 - protein, 9 aa, Homo sapiens
PAPPPPPPP

SEQ ID NO: 140820 - protein, 9 aa, Homo sapiens
APPPPPPPP

SEQ ID NO: 140821 - protein, 9 aa, Homo sapiens
PPPPPPPPP

SEQ ID NO: 140822 - protein, 9 aa, Homo sapiens
PPPPPPPPH

SEQ ID NO: 140823 - protein, 9 aa, Homo sapiens
PPPPPPPHS

SEQ ID NO: 140824 - protein, 9 aa, Homo sapiens
PPPPPPHSF

SEQ ID NO: 140825 - protein, 9 aa, Homo sapiens
PPPPPHSFI

SEQ ID NO: 140826 - protein, 9 aa, Homo sapiens
PPPPHSFIK

SEQ ID NO: 140827 - protein, 9 aa, Homo sapiens
PPPHSFIKQ

SEQ ID NO: 140828 - protein, 9 aa, Homo sapiens
PPHSFIKQE

SEQ ID NO: 140829 - protein, 9 aa, Homo sapiens
PHSFIKQEP

SEQ ID NO: 140830 - protein, 9 aa, Homo sapiens
HSFIKQEPS

SEQ ID NO: 140831 - protein, 9 aa, Homo sapiens
SFIKQEPSW

SEQ ID NO: 140832 - protein, 9 aa, Homo sapiens
FIKQEPSWG

SEQ ID NO: 140833 - protein, 9 aa, Homo sapiens
IKQEPSWGG

SEQ ID NO: 140834 - protein, 9 aa, Homo sapiens
KQEPSWGGA

SEQ ID NO: 140835 - protein, 9 aa, Homo sapiens
QEPSWGGAE

SEQ ID NO: 140836 - protein, 9 aa, Homo sapiens
EPSWGGAEP

SEQ ID NO: 140837 - protein, 9 aa, Homo sapiens
PSWGGAEPH

SEQ ID NO: 140838 - protein, 9 aa, Homo sapiens
SWGGAEPHE

SEQ ID NO: 140839 - protein, 9 aa, Homo sapiens
WGGAEPHEE

SEQ ID NO: 140840 - protein, 9 aa, Homo sapiens
GGAEPHEEQ

SEQ ID NO: 140841 - protein, 9 aa, Homo sapiens
GAEPHEEQC

SEQ ID NO: 140842 - protein, 9 aa, Homo sapiens
AEPHEEQCL

SEQ ID NO: 140843 - protein, 9 aa, Homo sapiens
EPHEEQCLS

SEQ ID NO: 140844 - protein, 9 aa, Homo sapiens
PHEEQCLSA

SEQ ID NO: 140845 - protein, 9 aa, Homo sapiens
HEEQCLSAF

SEQ ID NO: 140846 - protein, 9 aa, Homo sapiens
EEQCLSAFT

SEQ ID NO: 140847 - protein, 9 aa, Homo sapiens
EQCLSAFTV

SEQ ID NO: 140848 - protein, 9 aa, Homo sapiens
QCLSAFTVH

SEQ ID NO: 140849 - protein, 9 aa, Homo sapiens
CLSAFTVHF

SEQ ID NO: 140850 - protein, 9 aa, Homo sapiens
LSAFTVHFS

SEQ ID NO: 140851 - protein, 9 aa, Homo sapiens
SAFTVHFSG

SEQ ID NO: 140852 - protein, 9 aa, Homo sapiens
AFTVHFSGQ

SEQ ID NO: 140853 - protein, 9 aa, Homo sapiens
FTVHFSGQF

SEQ ID NO: 140854 - protein, 9 aa, Homo sapiens
TVHFSGQFT

SEQ ID NO: 140855 - protein, 9 aa, Homo sapiens
VHFSGQFTG

SEQ ID NO: 140856 - protein, 9 aa, Homo sapiens
HFSGQFTGT

SEQ ID NO: 140857 - protein, 9 aa, Homo sapiens
FSGQFTGTA

SEQ ID NO: 140858 - protein, 9 aa, Homo sapiens
SGQFTGTAG

SEQ ID NO: 140859 - protein, 9 aa, Homo sapiens
GQFTGTAGA

SEQ ID NO: 140860 - protein, 9 aa, Homo sapiens
QFTGTAGAC

SEQ ID NO: 140861 - protein, 9 aa, Homo sapiens
FTGTAGACR

SEQ ID NO: 140862 - protein, 9 aa, Homo sapiens
TGTAGACRY

SEQ ID NO: 140863 - protein, 9 aa, Homo sapiens
GTAGACRYG

SEQ ID NO: 140864 - protein, 9 aa, Homo sapiens
TAGACRYGP

SEQ ID NO: 140865 - protein, 9 aa, Homo sapiens
AGACRYGPF

SEQ ID NO: 140866 - protein, 9 aa, Homo sapiens
GACRYGPFG

SEQ ID NO: 140867 - protein, 9 aa, Homo sapiens
ACRYGPFGP

SEQ ID NO: 140868 - protein, 9 aa, Homo sapiens
CRYGPFGPP

SEQ ID NO: 140869 - protein, 9 aa, Homo sapiens
RYGPFGPPP

SEQ ID NO: 140870 - protein, 9 aa, Homo sapiens
YGPFGPPPP

SEQ ID NO: 140871 - protein, 9 aa, Homo sapiens
GPFGPPPPS

SEQ ID NO: 140872 - protein, 9 aa, Homo sapiens
PFGPPPPSQ

SEQ ID NO: 140873 - protein, 9 aa, Homo sapiens
FGPPPPSQA

SEQ ID NO: 140874 - protein, 9 aa, Homo sapiens
GPPPPSQAS

SEQ ID NO: 140875 - protein, 9 aa, Homo sapiens
PPPPSQASS

SEQ ID NO: 140876 - protein, 9 aa, Homo sapiens
PPPSQASSG

SEQ ID NO: 140877 - protein, 9 aa, Homo sapiens
PPSQASSGQ

SEQ ID NO: 140878 - protein, 9 aa, Homo sapiens
PSQASSGQA

SEQ ID NO: 140879 - protein, 9 aa, Homo sapiens
SQASSGQAR

SEQ ID NO: 140880 - protein, 9 aa, Homo sapiens
QASSGQARM

SEQ ID NO: 140881 - protein, 9 aa, Homo sapiens
ASSGQARMF

SEQ ID NO: 140882 - protein, 9 aa, Homo sapiens
SSGQARMFP

SEQ ID NO: 140883 - protein, 9 aa, Homo sapiens
SGQARMFPN

SEQ ID NO: 140884 - protein, 9 aa, Homo sapiens
GQARMFPNA

SEQ ID NO: 140885 - protein, 9 aa, Homo sapiens
QARMFPNAP

SEQ ID NO: 140886 - protein, 9 aa, Homo sapiens
ARMFPNAPY

SEQ ID NO: 140887 - protein, 9 aa, Homo sapiens
RMFPNAPYL

SEQ ID NO: 140888 - protein, 9 aa, Homo sapiens
MFPNAPYLP

SEQ ID NO: 140889 - protein, 9 aa, Homo sapiens
FPNAPYLPS

SEQ ID NO: 140890 - protein, 9 aa, Homo sapiens
PNAPYLPSC

SEQ ID NO: 140891 - protein, 9 aa, Homo sapiens
NAPYLPSCL

SEQ ID NO: 140892 - protein, 9 aa, Homo sapiens
APYLPSCLE

SEQ ID NO: 140893 - protein, 9 aa, Homo sapiens
PYLPSCLES

SEQ ID NO: 140894 - protein, 9 aa, Homo sapiens
YLPSCLESQ

SEQ ID NO: 140895 - protein, 9 aa, Homo sapiens
LPSCLESQP

SEQ ID NO: 140896 - protein, 9 aa, Homo sapiens
PSCLESQPA

SEQ ID NO: 140897 - protein, 9 aa, Homo sapiens
SCLESQPAI

SEQ ID NO: 140898 - protein, 9 aa, Homo sapiens
CLESQPAIR

SEQ ID NO: 140899 - protein, 9 aa, Homo sapiens
LESQPAIRN

SEQ ID NO: 140900 - protein, 9 aa, Homo sapiens
ESQPAIRNQ

SEQ ID NO: 140901 - protein, 9 aa, Homo sapiens
SQPAIRNQG

SEQ ID NO: 140902 - protein, 9 aa, Homo sapiens
QPAIRNQGY

SEQ ID NO: 140903 - protein, 9 aa, Homo sapiens
PAIRNQGYS

SEQ ID NO: 140904 - protein, 9 aa, Homo sapiens
AIRNQGYST

SEQ ID NO: 140905 - protein, 9 aa, Homo sapiens
IRNQGYSTV

SEQ ID NO: 140906 - protein, 9 aa, Homo sapiens
RNQGYSTVT

SEQ ID NO: 140907 - protein, 9 aa, Homo sapiens
NQGYSTVTF

SEQ ID NO: 140908 - protein, 9 aa, Homo sapiens
QGYSTVTFD

SEQ ID NO: 140909 - protein, 9 aa, Homo sapiens
GYSTVTFDG

SEQ ID NO: 140910 - protein, 9 aa, Homo sapiens
YSTVTFDGT

SEQ ID NO: 140911 - protein, 9 aa, Homo sapiens
STVTFDGTP

SEQ ID NO: 140912 - protein, 9 aa, Homo sapiens
TVTFDGTPS

SEQ ID NO: 140913 - protein, 9 aa, Homo sapiens
VTFDGTPSY

SEQ ID NO: 140914 - protein, 9 aa, Homo sapiens
TFDGTPSYG

SEQ ID NO: 140915 - protein, 9 aa, Homo sapiens
FDGTPSYGH

SEQ ID NO: 140916 - protein, 9 aa, Homo sapiens
DGTPSYGHT

SEQ ID NO: 140917 - protein, 9 aa, Homo sapiens
GTPSYGHTP

SEQ ID NO: 140918 - protein, 9 aa, Homo sapiens
TPSYGHTPS

SEQ ID NO: 140919 - protein, 9 aa, Homo sapiens
PSYGHTPSH

SEQ ID NO: 140920 - protein, 9 aa, Homo sapiens
SYGHTPSHH

SEQ ID NO: 140921 - protein, 9 aa, Homo sapiens
YGHTPSHHA

SEQ ID NO: 140922 - protein, 9 aa, Homo sapiens
GHTPSHHAA

SEQ ID NO: 140923 - protein, 9 aa, Homo sapiens
HTPSHHAAQ

SEQ ID NO: 140924 - protein, 9 aa, Homo sapiens
TPSHHAAQF

SEQ ID NO: 140925 - protein, 9 aa, Homo sapiens
PSHHAAQFP

SEQ ID NO: 140926 - protein, 9 aa, Homo sapiens
SHHAAQFPN

SEQ ID NO: 140927 - protein, 9 aa, Homo sapiens
HHAAQFPNH

SEQ ID NO: 140928 - protein, 9 aa, Homo sapiens
HAAQFPNHS

SEQ ID NO: 140929 - protein, 9 aa, Homo sapiens
AAQFPNHSF

SEQ ID NO: 140930 - protein, 9 aa, Homo sapiens
AQFPNHSFK

SEQ ID NO: 140931 - protein, 9 aa, Homo sapiens
QFPNHSFKH

SEQ ID NO: 140932 - protein, 9 aa, Homo sapiens
FPNHSFKHE

SEQ ID NO: 140933 - protein, 9 aa, Homo sapiens
PNHSFKHED

SEQ ID NO: 140934 - protein, 9 aa, Homo sapiens
NHSFKHEDP

SEQ ID NO: 140935 - protein, 9 aa, Homo sapiens
HSFKHEDPM

SEQ ID NO: 140936 - protein, 9 aa, Homo sapiens
SFKHEDPMG

SEQ ID NO: 140937 - protein, 9 aa, Homo sapiens
FKHEDPMGQ

SEQ ID NO: 140938 - protein, 9 aa, Homo sapiens
KHEDPMGQQ

SEQ ID NO: 140939 - protein, 9 aa, Homo sapiens
HEDPMGQQG

SEQ ID NO: 140940 - protein, 9 aa, Homo sapiens
EDPMGQQGS

SEQ ID NO: 140941 - protein, 9 aa, Homo sapiens
DPMGQQGSL

SEQ ID NO: 140942 - protein, 9 aa, Homo sapiens
PMGQQGSLG

SEQ ID NO: 140943 - protein, 9 aa, Homo sapiens
MGQQGSLGE

SEQ ID NO: 140944 - protein, 9 aa, Homo sapiens
GQQGSLGEQ

SEQ ID NO: 140945 - protein, 9 aa, Homo sapiens
QQGSLGEQQ

SEQ ID NO: 140946 - protein, 9 aa, Homo sapiens
QGSLGEQQY

SEQ ID NO: 140947 - protein, 9 aa, Homo sapiens
GSLGEQQYS

SEQ ID NO: 140948 - protein, 9 aa, Homo sapiens
SLGEQQYSV

SEQ ID NO: 140949 - protein, 9 aa, Homo sapiens
LGEQQYSVP

SEQ ID NO: 140950 - protein, 9 aa, Homo sapiens
GEQQYSVPP

SEQ ID NO: 140951 - protein, 9 aa, Homo sapiens
EQQYSVPPP

SEQ ID NO: 140952 - protein, 9 aa, Homo sapiens
QQYSVPPPV

SEQ ID NO: 140953 - protein, 9 aa, Homo sapiens
QYSVPPPVY

SEQ ID NO: 140954 - protein, 9 aa, Homo sapiens
YSVPPPVYG

SEQ ID NO: 140955 - protein, 9 aa, Homo sapiens
SVPPPVYGC

SEQ ID NO: 140956 - protein, 9 aa, Homo sapiens
VPPPVYGCH

SEQ ID NO: 140957 - protein, 9 aa, Homo sapiens
PPPVYGCHT

SEQ ID NO: 140958 - protein, 9 aa, Homo sapiens
PPVYGCHTP

SEQ ID NO: 140959 - protein, 9 aa, Homo sapiens
PVYGCHTPT

SEQ ID NO: 140960 - protein, 9 aa, Homo sapiens
VYGCHTPTD

SEQ ID NO: 140961 - protein, 9 aa, Homo sapiens
YGCHTPTDS

SEQ ID NO: 140962 - protein, 9 aa, Homo sapiens
GCHTPTDSC

SEQ ID NO: 140963 - protein, 9 aa, Homo sapiens
CHTPTDSCT

SEQ ID NO: 140964 - protein, 9 aa, Homo sapiens
HTPTDSCTG

SEQ ID NO: 140965 - protein, 9 aa, Homo sapiens
TPTDSCTGS

SEQ ID NO: 140966 - protein, 9 aa, Homo sapiens
PTDSCTGSQ

SEQ ID NO: 140967 - protein, 9 aa, Homo sapiens
TDSCTGSQA

SEQ ID NO: 140968 - protein, 9 aa, Homo sapiens
DSCTGSQAL

SEQ ID NO: 140969 - protein, 9 aa, Homo sapiens
SCTGSQALL

SEQ ID NO: 140970 - protein, 9 aa, Homo sapiens
CTGSQALLL

SEQ ID NO: 140971 - protein, 9 aa, Homo sapiens
TGSQALLLR

SEQ ID NO: 140972 - protein, 9 aa, Homo sapiens
GSQALLLRT

SEQ ID NO: 140973 - protein, 9 aa, Homo sapiens
SQALLLRTP

SEQ ID NO: 140974 - protein, 9 aa, Homo sapiens
QALLLRTPY

SEQ ID NO: 140975 - protein, 9 aa, Homo sapiens
ALLLRTPYS

SEQ ID NO: 140976 - protein, 9 aa, Homo sapiens
LLLRTPYSS

SEQ ID NO: 140977 - protein, 9 aa, Homo sapiens
LLRTPYSSD

SEQ ID NO: 140978 - protein, 9 aa, Homo sapiens
LRTPYSSDN

SEQ ID NO: 140979 - protein, 9 aa, Homo sapiens
RTPYSSDNL

SEQ ID NO: 140980 - protein, 9 aa, Homo sapiens
TPYSSDNLY

SEQ ID NO: 140981 - protein, 9 aa, Homo sapiens
PYSSDNLYQ

SEQ ID NO: 140982 - protein, 9 aa, Homo sapiens
YSSDNLYQM

SEQ ID NO: 140983 - protein, 9 aa, Homo sapiens
SSDNLYQMT

SEQ ID NO: 140984 - protein, 9 aa, Homo sapiens
SDNLYQMTS

SEQ ID NO: 140985 - protein, 9 aa, Homo sapiens
DNLYQMTSQ

SEQ ID NO: 140986 - protein, 9 aa, Homo sapiens
NLYQMTSQL

SEQ ID NO: 140987 - protein, 9 aa, Homo sapiens
LYQMTSQLE

SEQ ID NO: 140988 - protein, 9 aa, Homo sapiens
YQMTSQLEC

SEQ ID NO: 140989 - protein, 9 aa, Homo sapiens
QMTSQLECM

SEQ ID NO: 140990 - protein, 9 aa, Homo sapiens
MTSQLECMT

SEQ ID NO: 140991 - protein, 9 aa, Homo sapiens
TSQLECMTW

SEQ ID NO: 140992 - protein, 9 aa, Homo sapiens
SQLECMTWN

SEQ ID NO: 140993 - protein, 9 aa, Homo sapiens
QLECMTWNQ

SEQ ID NO: 140994 - protein, 9 aa, Homo sapiens
LECMTWNQM

SEQ ID NO: 140995 - protein, 9 aa, Homo sapiens
ECMTWNQMN

SEQ ID NO: 140996 - protein, 9 aa, Homo sapiens
CMTWNQMNL

SEQ ID NO: 140997 - protein, 9 aa, Homo sapiens
MTWNQMNLG

SEQ ID NO: 140998 - protein, 9 aa, Homo sapiens
TWNQMNLGA

SEQ ID NO: 140999 - protein, 9 aa, Homo sapiens
WNQMNLGAT

SEQ ID NO: 141000 - protein, 9 aa, Homo sapiens
NQMNLGATL

SEQ ID NO: 141001 - protein, 9 aa, Homo sapiens
QMNLGATLK

SEQ ID NO: 141002 - protein, 9 aa, Homo sapiens
MNLGATLKG

SEQ ID NO: 141003 - protein, 9 aa, Homo sapiens
NLGATLKGH

SEQ ID NO: 141004 - protein, 9 aa, Homo sapiens
LGATLKGHS

SEQ ID NO: 141005 - protein, 9 aa, Homo sapiens
GATLKGHST

SEQ ID NO: 141006 - protein, 9 aa, Homo sapiens
ATLKGHSTG

SEQ ID NO: 141007 - protein, 9 aa, Homo sapiens
TLKGHSTGY

SEQ ID NO: 141008 - protein, 9 aa, Homo sapiens
LKGHSTGYE

SEQ ID NO: 141009 - protein, 9 aa, Homo sapiens
KGHSTGYES

SEQ ID NO: 141010 - protein, 9 aa, Homo sapiens
GHSTGYESD

SEQ ID NO: 141011 - protein, 9 aa, Homo sapiens
HSTGYESDN

SEQ ID NO: 141012 - protein, 9 aa, Homo sapiens
STGYESDNH

SEQ ID NO: 141013 - protein, 9 aa, Homo sapiens
TGYESDNHT

SEQ ID NO: 141014 - protein, 9 aa, Homo sapiens
GYESDNHTT

SEQ ID NO: 141015 - protein, 9 aa, Homo sapiens
YESDNHTTP

SEQ ID NO: 141016 - protein, 9 aa, Homo sapiens
ESDNHTTPI

SEQ ID NO: 141017 - protein, 9 aa, Homo sapiens
SDNHTTPIL

SEQ ID NO: 141018 - protein, 9 aa, Homo sapiens
DNHTTPILC

SEQ ID NO: 141019 - protein, 9 aa, Homo sapiens
NHTTPILCG

SEQ ID NO: 141020 - protein, 9 aa, Homo sapiens
HTTPILCGA

SEQ ID NO: 141021 - protein, 9 aa, Homo sapiens
TTPILCGAQ

SEQ ID NO: 141022 - protein, 9 aa, Homo sapiens
TPILCGAQY

SEQ ID NO: 141023 - protein, 9 aa, Homo sapiens
PILCGAQYR

SEQ ID NO: 141024 - protein, 9 aa, Homo sapiens
ILCGAQYRI

SEQ ID NO: 141025 - protein, 9 aa, Homo sapiens
LCGAQYRIH

SEQ ID NO: 141026 - protein, 9 aa, Homo sapiens
CGAQYRIHT

SEQ ID NO: 141027 - protein, 9 aa, Homo sapiens
GAQYRIHTH

SEQ ID NO: 141028 - protein, 9 aa, Homo sapiens
AQYRIHTHG

SEQ ID NO: 141029 - protein, 9 aa, Homo sapiens
QYRIHTHGV

SEQ ID NO: 141030 - protein, 9 aa, Homo sapiens
YRIHTHGVF

SEQ ID NO: 141031 - protein, 9 aa, Homo sapiens
RIHTHGVFR

SEQ ID NO: 141032 - protein, 9 aa, Homo sapiens
IHTHGVFRG

SEQ ID NO: 141033 - protein, 9 aa, Homo sapiens
HTHGVFRGI

SEQ ID NO: 141034 - protein, 9 aa, Homo sapiens
THGVFRGIQ

SEQ ID NO: 141035 - protein, 9 aa, Homo sapiens
HGVFRGIQD

SEQ ID NO: 141036 - protein, 9 aa, Homo sapiens
GVFRGIQDV

SEQ ID NO: 141037 - protein, 9 aa, Homo sapiens
VFRGIQDVR

SEQ ID NO: 141038 - protein, 9 aa, Homo sapiens
FRGIQDVRR

SEQ ID NO: 141039 - protein, 9 aa, Homo sapiens
RGIQDVRRV

SEQ ID NO: 141040 - protein, 9 aa, Homo sapiens
GIQDVRRVP

SEQ ID NO: 141041 - protein, 9 aa, Homo sapiens
IQDVRRVPG

SEQ ID NO: 141042 - protein, 9 aa, Homo sapiens
QDVRRVPGV

SEQ ID NO: 141043 - protein, 9 aa, Homo sapiens
DVRRVPGVA

SEQ ID NO: 141044 - protein, 9 aa, Homo sapiens
VRRVPGVAP

SEQ ID NO: 141045 - protein, 9 aa, Homo sapiens
RRVPGVAPT

SEQ ID NO: 141046 - protein, 9 aa, Homo sapiens
RVPGVAPTL

SEQ ID NO: 141047 - protein, 9 aa, Homo sapiens
VPGVAPTLV

SEQ ID NO: 141048 - protein, 9 aa, Homo sapiens
PGVAPTLVR

SEQ ID NO: 141049 - protein, 9 aa, Homo sapiens
GVAPTLVRS

SEQ ID NO: 141050 - protein, 9 aa, Homo sapiens
VAPTLVRSA

SEQ ID NO: 141051 - protein, 9 aa, Homo sapiens
APTLVRSAS

SEQ ID NO: 141052 - protein, 9 aa, Homo sapiens
PTLVRSASE

SEQ ID NO: 141053 - protein, 9 aa, Homo sapiens
TLVRSASET

SEQ ID NO: 141054 - protein, 9 aa, Homo sapiens
LVRSASETS

SEQ ID NO: 141055 - protein, 9 aa, Homo sapiens
VRSASETSE

SEQ ID NO: 141056 - protein, 9 aa, Homo sapiens
RSASETSEK

SEQ ID NO: 141057 - protein, 9 aa, Homo sapiens
SASETSEKR

SEQ ID NO: 141058 - protein, 9 aa, Homo sapiens
ASETSEKRP

SEQ ID NO: 141059 - protein, 9 aa, Homo sapiens
SETSEKRPF

SEQ ID NO: 141060 - protein, 9 aa, Homo sapiens
ETSEKRPFM

SEQ ID NO: 141061 - protein, 9 aa, Homo sapiens
TSEKRPFMC

SEQ ID NO: 141062 - protein, 9 aa, Homo sapiens
SEKRPFMCA

SEQ ID NO: 141063 - protein, 9 aa, Homo sapiens
EKRPFMCAY

SEQ ID NO: 141064 - protein, 9 aa, Homo sapiens
KRPFMCAYP

SEQ ID NO: 141065 - protein, 9 aa, Homo sapiens
RPFMCAYPG

SEQ ID NO: 141066 - protein, 9 aa, Homo sapiens
PFMCAYPGC

SEQ ID NO: 141067 - protein, 9 aa, Homo sapiens
FMCAYPGCN

SEQ ID NO: 141068 - protein, 9 aa, Homo sapiens
MCAYPGCNK

SEQ ID NO: 141069 - protein, 9 aa, Homo sapiens
CAYPGCNKR

SEQ ID NO: 141070 - protein, 9 aa, Homo sapiens
AYPGCNKRY

SEQ ID NO: 141071 - protein, 9 aa, Homo sapiens
YPGCNKRYF

SEQ ID NO: 141072 - protein, 9 aa, Homo sapiens
PGCNKRYFK

SEQ ID NO: 141073 - protein, 9 aa, Homo sapiens
GCNKRYFKL

SEQ ID NO: 141074 - protein, 9 aa, Homo sapiens
CNKRYFKLS

SEQ ID NO: 141075 - protein, 9 aa, Homo sapiens
NKRYFKLSH

SEQ ID NO: 141076 - protein, 9 aa, Homo sapiens
KRYFKLSHL

SEQ ID NO: 141077 - protein, 9 aa, Homo sapiens
RYFKLSHLQ

SEQ ID NO: 141078 - protein, 9 aa, Homo sapiens
YFKLSHLQM

SEQ ID NO: 141079 - protein, 9 aa, Homo sapiens
FKLSHLQMH

SEQ ID NO: 141080 - protein, 9 aa, Homo sapiens
KLSHLQMHS

SEQ ID NO: 141081 - protein, 9 aa, Homo sapiens
LSHLQMHSR

SEQ ID NO: 141082 - protein, 9 aa, Homo sapiens
SHLQMHSRK

SEQ ID NO: 141083 - protein, 9 aa, Homo sapiens
HLQMHSRKH

SEQ ID NO: 141084 - protein, 9 aa, Homo sapiens
LQMHSRKHT

SEQ ID NO: 141085 - protein, 9 aa, Homo sapiens
QMHSRKHTG

SEQ ID NO: 141086 - protein, 9 aa, Homo sapiens
MHSRKHTGE

SEQ ID NO: 141087 - protein, 9 aa, Homo sapiens
HSRKHTGEK

SEQ ID NO: 141088 - protein, 9 aa, Homo sapiens
SRKHTGEKP

SEQ ID NO: 141089 - protein, 9 aa, Homo sapiens
RKHTGEKPY

SEQ ID NO: 141090 - protein, 9 aa, Homo sapiens
KHTGEKPYQ

SEQ ID NO: 141091 - protein, 9 aa, Homo sapiens
HTGEKPYQC

SEQ ID NO: 141092 - protein, 9 aa, Homo sapiens
TGEKPYQCD

SEQ ID NO: 141093 - protein, 9 aa, Homo sapiens
GEKPYQCDF

SEQ ID NO: 141094 - protein, 9 aa, Homo sapiens
EKPYQCDFK

SEQ ID NO: 141095 - protein, 9 aa, Homo sapiens
KPYQCDFKD

SEQ ID NO: 141096 - protein, 9 aa, Homo sapiens
PYQCDFKDC

SEQ ID NO: 141097 - protein, 9 aa, Homo sapiens
YQCDFKDCE

SEQ ID NO: 141098 - protein, 9 aa, Homo sapiens
QCDFKDCER

SEQ ID NO: 141099 - protein, 9 aa, Homo sapiens
CDFKDCERR

SEQ ID NO: 141100 - protein, 9 aa, Homo sapiens
DFKDCERRF

SEQ ID NO: 141101 - protein, 9 aa, Homo sapiens
FKDCERRFS

SEQ ID NO: 141102 - protein, 9 aa, Homo sapiens
KDCERRFSR

SEQ ID NO: 141103 - protein, 9 aa, Homo sapiens
DCERRFSRS

SEQ ID NO: 141104 - protein, 9 aa, Homo sapiens
CERRFSRSD

SEQ ID NO: 141105 - protein, 9 aa, Homo sapiens
ERRFSRSDQ

SEQ ID NO: 141106 - protein, 9 aa, Homo sapiens
RRFSRSDQL

SEQ ID NO: 141107 - protein, 9 aa, Homo sapiens
RFSRSDQLK

SEQ ID NO: 141108 - protein, 9 aa, Homo sapiens
FSRSDQLKR

SEQ ID NO: 141109 - protein, 9 aa, Homo sapiens
SRSDQLKRH

SEQ ID NO: 141110 - protein, 9 aa, Homo sapiens
RSDQLKRHQ

SEQ ID NO: 141111 - protein, 9 aa, Homo sapiens
SDQLKRHQR

SEQ ID NO: 141112 - protein, 9 aa, Homo sapiens
DQLKRHQRR

SEQ ID NO: 141113 - protein, 9 aa, Homo sapiens
QLKRHQRRH

SEQ ID NO: 141114 - protein, 9 aa, Homo sapiens
LKRHQRRHT

SEQ ID NO: 141115 - protein, 9 aa, Homo sapiens
KRHQRRHTG

SEQ ID NO: 141116 - protein, 9 aa, Homo sapiens
RHQRRHTGV

SEQ ID NO: 141117 - protein, 9 aa, Homo sapiens
HQRRHTGVK

SEQ ID NO: 141118 - protein, 9 aa, Homo sapiens
QRRHTGVKP

SEQ ID NO: 141119 - protein, 9 aa, Homo sapiens
RRHTGVKPF

SEQ ID NO: 141120 - protein, 9 aa, Homo sapiens
RHTGVKPFQ

SEQ ID NO: 141121 - protein, 9 aa, Homo sapiens
HTGVKPFQC

SEQ ID NO: 141122 - protein, 9 aa, Homo sapiens
TGVKPFQCK

SEQ ID NO: 141123 - protein, 9 aa, Homo sapiens
GVKPFQCKT

SEQ ID NO: 141124 - protein, 9 aa, Homo sapiens
VKPFQCKTC

SEQ ID NO: 141125 - protein, 9 aa, Homo sapiens
KPFQCKTCQ

SEQ ID NO: 141126 - protein, 9 aa, Homo sapiens
PFQCKTCQR

SEQ ID NO: 141127 - protein, 9 aa, Homo sapiens
FQCKTCQRK

SEQ ID NO: 141128 - protein, 9 aa, Homo sapiens
QCKTCQRKF

SEQ ID NO: 141129 - protein, 9 aa, Homo sapiens
CKTCQRKFS

SEQ ID NO: 141130 - protein, 9 aa, Homo sapiens
KTCQRKFSR

SEQ ID NO: 141131 - protein, 9 aa, Homo sapiens
TCQRKFSRS

SEQ ID NO: 141132 - protein, 9 aa, Homo sapiens
CQRKFSRSD

SEQ ID NO: 141133 - protein, 9 aa, Homo sapiens
QRKFSRSDH

SEQ ID NO: 141134 - protein, 9 aa, Homo sapiens
RKFSRSDHL

SEQ ID NO: 141135 - protein, 9 aa, Homo sapiens
KFSRSDHLK

SEQ ID NO: 141136 - protein, 9 aa, Homo sapiens
FSRSDHLKT

SEQ ID NO: 141137 - protein, 9 aa, Homo sapiens
SRSDHLKTH

SEQ ID NO: 141138 - protein, 9 aa, Homo sapiens
RSDHLKTHT

SEQ ID NO: 141139 - protein, 9 aa, Homo sapiens
SDHLKTHTR

SEQ ID NO: 141140 - protein, 9 aa, Homo sapiens
DHLKTHTRT

SEQ ID NO: 141141 - protein, 9 aa, Homo sapiens
HLKTHTRTH

SEQ ID NO: 141142 - protein, 9 aa, Homo sapiens
LKTHTRTHT

SEQ ID NO: 141143 - protein, 9 aa, Homo sapiens
KTHTRTHTG

SEQ ID NO: 141144 - protein, 9 aa, Homo sapiens
THTRTHTGK

SEQ ID NO: 141145 - protein, 9 aa, Homo sapiens
HTRTHTGKT

SEQ ID NO: 141146 - protein, 9 aa, Homo sapiens
TRTHTGKTS

SEQ ID NO: 141147 - protein, 9 aa, Homo sapiens
RTHTGKTSE

SEQ ID NO: 141148 - protein, 9 aa, Homo sapiens
THTGKTSEK

SEQ ID NO: 141149 - protein, 9 aa, Homo sapiens
HTGKTSEKP

SEQ ID NO: 141150 - protein, 9 aa, Homo sapiens
TGKTSEKPF

SEQ ID NO: 141151 - protein, 9 aa, Homo sapiens
GKTSEKPFS

SEQ ID NO: 141152 - protein, 9 aa, Homo sapiens
KTSEKPFSC

SEQ ID NO: 141153 - protein, 9 aa, Homo sapiens
TSEKPFSCR

SEQ ID NO: 141154 - protein, 9 aa, Homo sapiens
SEKPFSCRW

SEQ ID NO: 141155 - protein, 9 aa, Homo sapiens
EKPFSCRWP

SEQ ID NO: 141156 - protein, 9 aa, Homo sapiens
KPFSCRWPS

SEQ ID NO: 141157 - protein, 9 aa, Homo sapiens
PFSCRWPSC

SEQ ID NO: 141158 - protein, 9 aa, Homo sapiens
FSCRWPSCQ

SEQ ID NO: 141159 - protein, 9 aa, Homo sapiens
SCRWPSCQK

SEQ ID NO: 141160 - protein, 9 aa, Homo sapiens
CRWPSCQKK

SEQ ID NO: 141161 - protein, 9 aa, Homo sapiens
RWPSCQKKF

SEQ ID NO: 141162 - protein, 9 aa, Homo sapiens
WPSCQKKFA

SEQ ID NO: 141163 - protein, 9 aa, Homo sapiens
PSCQKKFAR

SEQ ID NO: 141164 - protein, 9 aa, Homo sapiens
SCQKKFARS

SEQ ID NO: 141165 - protein, 9 aa, Homo sapiens
CQKKFARSD

SEQ ID NO: 141166 - protein, 9 aa, Homo sapiens
QKKFARSDE

SEQ ID NO: 141167 - protein, 9 aa, Homo sapiens
KKFARSDEL

SEQ ID NO: 141168 - protein, 9 aa, Homo sapiens
KFARSDELV

SEQ ID NO: 141169 - protein, 9 aa, Homo sapiens
FARSDELVR

SEQ ID NO: 141170 - protein, 9 aa, Homo sapiens
ARSDELVRH

SEQ ID NO: 141171 - protein, 9 aa, Homo sapiens
RSDELVRHH

SEQ ID NO: 141172 - protein, 9 aa, Homo sapiens
SDELVRHHN

SEQ ID NO: 141173 - protein, 9 aa, Homo sapiens
DELVRHHNM

SEQ ID NO: 141174 - protein, 9 aa, Homo sapiens
ELVRHHNMH

SEQ ID NO: 141175 - protein, 9 aa, Homo sapiens
LVRHHNMHQ

SEQ ID NO: 141176 - protein, 9 aa, Homo sapiens
VRHHNMHQR

SEQ ID NO: 141177 - protein, 9 aa, Homo sapiens
RHHNMHQRN

SEQ ID NO: 141178 - protein, 9 aa, Homo sapiens
HHNMHQRNM

SEQ ID NO: 141179 - protein, 9 aa, Homo sapiens
HNMHQRNMT

SEQ ID NO: 141180 - protein, 9 aa, Homo sapiens
NMHQRNMTK

SEQ ID NO: 141181 - protein, 9 aa, Homo sapiens
MHQRNMTKL

SEQ ID NO: 141182 - protein, 9 aa, Homo sapiens
HQRNMTKLQ

SEQ ID NO: 141183 - protein, 9 aa, Homo sapiens
QRNMTKLQL

SEQ ID NO: 141184 - protein, 9 aa, Homo sapiens
RNMTKLQLA

SEQ ID NO: 141185 - protein, 9 aa, Homo sapiens
NMTKLQLAL

SEQ ID NO: 141186 - protein, 9 aa, Homo sapiens
MFGLKRNAV

SEQ ID NO: 141187 - protein, 9 aa, Homo sapiens
FGLKRNAVI

SEQ ID NO: 141188 - protein, 9 aa, Homo sapiens
GLKRNAVIG

SEQ ID NO: 141189 - protein, 9 aa, Homo sapiens
LKRNAVIGL

SEQ ID NO: 141190 - protein, 9 aa, Homo sapiens
KRNAVIGLN

SEQ ID NO: 141191 - protein, 9 aa, Homo sapiens
RNAVIGLNL

SEQ ID NO: 141192 - protein, 9 aa, Homo sapiens
NAVIGLNLY

SEQ ID NO: 141193 - protein, 9 aa, Homo sapiens
AVIGLNLYC

SEQ ID NO: 141194 - protein, 9 aa, Homo sapiens
VIGLNLYCG

SEQ ID NO: 141195 - protein, 9 aa, Homo sapiens
IGLNLYCGG

SEQ ID NO: 141196 - protein, 9 aa, Homo sapiens
GLNLYCGGA

SEQ ID NO: 141197 - protein, 9 aa, Homo sapiens
LNLYCGGAG

SEQ ID NO: 141198 - protein, 9 aa, Homo sapiens
NLYCGGAGL

SEQ ID NO: 141199 - protein, 9 aa, Homo sapiens
LYCGGAGLG

SEQ ID NO: 141200 - protein, 9 aa, Homo sapiens
YCGGAGLGA

SEQ ID NO: 141201 - protein, 9 aa, Homo sapiens
CGGAGLGAG

SEQ ID NO: 141202 - protein, 9 aa, Homo sapiens
GGAGLGAGS

SEQ ID NO: 141203 - protein, 9 aa, Homo sapiens
GAGLGAGSG

SEQ ID NO: 141204 - protein, 9 aa, Homo sapiens
AGLGAGSGG

SEQ ID NO: 141205 - protein, 9 aa, Homo sapiens
GLGAGSGGA

SEQ ID NO: 141206 - protein, 9 aa, Homo sapiens
LGAGSGGAT

SEQ ID NO: 141207 - protein, 9 aa, Homo sapiens
GAGSGGATR

SEQ ID NO: 141208 - protein, 9 aa, Homo sapiens
AGSGGATRP

SEQ ID NO: 141209 - protein, 9 aa, Homo sapiens
GSGGATRPG

SEQ ID NO: 141210 - protein, 9 aa, Homo sapiens
SGGATRPGG

SEQ ID NO: 141211 - protein, 9 aa, Homo sapiens
GGATRPGGR

SEQ ID NO: 141212 - protein, 9 aa, Homo sapiens
GATRPGGRL

SEQ ID NO: 141213 - protein, 9 aa, Homo sapiens
ATRPGGRLL

SEQ ID NO: 141214 - protein, 9 aa, Homo sapiens
TRPGGRLLA

SEQ ID NO: 141215 - protein, 9 aa, Homo sapiens
RPGGRLLAT

SEQ ID NO: 141216 - protein, 9 aa, Homo sapiens
PGGRLLATE

SEQ ID NO: 141217 - protein, 9 aa, Homo sapiens
GGRLLATEK

SEQ ID NO: 141218 - protein, 9 aa, Homo sapiens
GRLLATEKE

SEQ ID NO: 141219 - protein, 9 aa, Homo sapiens
RLLATEKEA

SEQ ID NO: 141220 - protein, 9 aa, Homo sapiens
LLATEKEAS

SEQ ID NO: 141221 - protein, 9 aa, Homo sapiens
LATEKEASA

SEQ ID NO: 141222 - protein, 9 aa, Homo sapiens
ATEKEASAR

SEQ ID NO: 141223 - protein, 9 aa, Homo sapiens
TEKEASARR

SEQ ID NO: 141224 - protein, 9 aa, Homo sapiens
EKEASARRE

SEQ ID NO: 141225 - protein, 9 aa, Homo sapiens
KEASARREI

SEQ ID NO: 141226 - protein, 9 aa, Homo sapiens
EASARREIG

SEQ ID NO: 141227 - protein, 9 aa, Homo sapiens
ASARREIGG

SEQ ID NO: 141228 - protein, 9 aa, Homo sapiens
SARREIGGG

SEQ ID NO: 141229 - protein, 9 aa, Homo sapiens
ARREIGGGE

SEQ ID NO: 141230 - protein, 9 aa, Homo sapiens
RREIGGGEA

SEQ ID NO: 141231 - protein, 9 aa, Homo sapiens
REIGGGEAG

SEQ ID NO: 141232 - protein, 9 aa, Homo sapiens
EIGGGEAGA

SEQ ID NO: 141233 - protein, 9 aa, Homo sapiens
IGGGEAGAV

SEQ ID NO: 141234 - protein, 9 aa, Homo sapiens
GGGEAGAVI

SEQ ID NO: 141235 - protein, 9 aa, Homo sapiens
GGEAGAVIG

SEQ ID NO: 141236 - protein, 9 aa, Homo sapiens
GEAGAVIGG

SEQ ID NO: 141237 - protein, 9 aa, Homo sapiens
EAGAVIGGS

SEQ ID NO: 141238 - protein, 9 aa, Homo sapiens
AGAVIGGSA

SEQ ID NO: 141239 - protein, 9 aa, Homo sapiens
GAVIGGSAG

SEQ ID NO: 141240 - protein, 9 aa, Homo sapiens
AVIGGSAGA

SEQ ID NO: 141241 - protein, 9 aa, Homo sapiens
VIGGSAGAS

SEQ ID NO: 141242 - protein, 9 aa, Homo sapiens
IGGSAGASP

SEQ ID NO: 141243 - protein, 9 aa, Homo sapiens
GGSAGASPP

SEQ ID NO: 141244 - protein, 9 aa, Homo sapiens
GSAGASPPS

SEQ ID NO: 141245 - protein, 9 aa, Homo sapiens
SAGASPPST

SEQ ID NO: 141246 - protein, 9 aa, Homo sapiens
AGASPPSTL

SEQ ID NO: 141247 - protein, 9 aa, Homo sapiens
GASPPSTLT

SEQ ID NO: 141248 - protein, 9 aa, Homo sapiens
ASPPSTLTP

SEQ ID NO: 141249 - protein, 9 aa, Homo sapiens
SPPSTLTPD

SEQ ID NO: 141250 - protein, 9 aa, Homo sapiens
PPSTLTPDS

SEQ ID NO: 141251 - protein, 9 aa, Homo sapiens
PSTLTPDSR

SEQ ID NO: 141252 - protein, 9 aa, Homo sapiens
STLTPDSRR

SEQ ID NO: 141253 - protein, 9 aa, Homo sapiens
TLTPDSRRV

SEQ ID NO: 141254 - protein, 9 aa, Homo sapiens
LTPDSRRVA

SEQ ID NO: 141255 - protein, 9 aa, Homo sapiens
TPDSRRVAR

SEQ ID NO: 141256 - protein, 9 aa, Homo sapiens
PDSRRVARP

SEQ ID NO: 141257 - protein, 9 aa, Homo sapiens
DSRRVARPP

SEQ ID NO: 141258 - protein, 9 aa, Homo sapiens
SRRVARPPP

SEQ ID NO: 141259 - protein, 9 aa, Homo sapiens
RRVARPPPI

SEQ ID NO: 141260 - protein, 9 aa, Homo sapiens
RVARPPPIG

SEQ ID NO: 141261 - protein, 9 aa, Homo sapiens
VARPPPIGA

SEQ ID NO: 141262 - protein, 9 aa, Homo sapiens
ARPPPIGAE

SEQ ID NO: 141263 - protein, 9 aa, Homo sapiens
RPPPIGAEV

SEQ ID NO: 141264 - protein, 9 aa, Homo sapiens
PPPIGAEVP

SEQ ID NO: 141265 - protein, 9 aa, Homo sapiens
PPIGAEVPD

SEQ ID NO: 141266 - protein, 9 aa, Homo sapiens
PIGAEVPDV

SEQ ID NO: 141267 - protein, 9 aa, Homo sapiens
IGAEVPDVT

SEQ ID NO: 141268 - protein, 9 aa, Homo sapiens
GAEVPDVTA

SEQ ID NO: 141269 - protein, 9 aa, Homo sapiens
AEVPDVTAT

SEQ ID NO: 141270 - protein, 9 aa, Homo sapiens
EVPDVTATP

SEQ ID NO: 141271 - protein, 9 aa, Homo sapiens
VPDVTATPA

SEQ ID NO: 141272 - protein, 9 aa, Homo sapiens
PDVTATPAR

SEQ ID NO: 141273 - protein, 9 aa, Homo sapiens
DVTATPARL

SEQ ID NO: 141274 - protein, 9 aa, Homo sapiens
VTATPARLL

SEQ ID NO: 141275 - protein, 9 aa, Homo sapiens
TATPARLLF

SEQ ID NO: 141276 - protein, 9 aa, Homo sapiens
ATPARLLFF

SEQ ID NO: 141277 - protein, 9 aa, Homo sapiens
TPARLLFFA

SEQ ID NO: 141278 - protein, 9 aa, Homo sapiens
PARLLFFAP

SEQ ID NO: 141279 - protein, 9 aa, Homo sapiens
ARLLFFAPT

SEQ ID NO: 141280 - protein, 9 aa, Homo sapiens
RLLFFAPTR

SEQ ID NO: 141281 - protein, 9 aa, Homo sapiens
LLFFAPTRR

SEQ ID NO: 141282 - protein, 9 aa, Homo sapiens
LFFAPTRRA

SEQ ID NO: 141283 - protein, 9 aa, Homo sapiens
FFAPTRRAA

SEQ ID NO: 141284 - protein, 9 aa, Homo sapiens
FAPTRRAAP

SEQ ID NO: 141285 - protein, 9 aa, Homo sapiens
APTRRAAPL

SEQ ID NO: 141286 - protein, 9 aa, Homo sapiens
PTRRAAPLE

SEQ ID NO: 141287 - protein, 9 aa, Homo sapiens
TRRAAPLEE

SEQ ID NO: 141288 - protein, 9 aa, Homo sapiens
RRAAPLEEM

SEQ ID NO: 141289 - protein, 9 aa, Homo sapiens
RAAPLEEME

SEQ ID NO: 141290 - protein, 9 aa, Homo sapiens
AAPLEEMEA

SEQ ID NO: 141291 - protein, 9 aa, Homo sapiens
APLEEMEAP

SEQ ID NO: 141292 - protein, 9 aa, Homo sapiens
PLEEMEAPA

SEQ ID NO: 141293 - protein, 9 aa, Homo sapiens
LEEMEAPAA

SEQ ID NO: 141294 - protein, 9 aa, Homo sapiens
EEMEAPAAD

SEQ ID NO: 141295 - protein, 9 aa, Homo sapiens
EMEAPAADA

SEQ ID NO: 141296 - protein, 9 aa, Homo sapiens
MEAPAADAI

SEQ ID NO: 141297 - protein, 9 aa, Homo sapiens
EAPAADAIM

SEQ ID NO: 141298 - protein, 9 aa, Homo sapiens
APAADAIMS

SEQ ID NO: 141299 - protein, 9 aa, Homo sapiens
PAADAIMSP

SEQ ID NO: 141300 - protein, 9 aa, Homo sapiens
AADAIMSPE

SEQ ID NO: 141301 - protein, 9 aa, Homo sapiens
ADAIMSPEE

SEQ ID NO: 141302 - protein, 9 aa, Homo sapiens
DAIMSPEEE

SEQ ID NO: 141303 - protein, 9 aa, Homo sapiens
AIMSPEEEL

SEQ ID NO: 141304 - protein, 9 aa, Homo sapiens
IMSPEEELD

SEQ ID NO: 141305 - protein, 9 aa, Homo sapiens
MSPEEELDG

SEQ ID NO: 141306 - protein, 9 aa, Homo sapiens
SPEEELDGY

SEQ ID NO: 141307 - protein, 9 aa, Homo sapiens
PEEELDGYE

SEQ ID NO: 141308 - protein, 9 aa, Homo sapiens
EEELDGYEP

SEQ ID NO: 141309 - protein, 9 aa, Homo sapiens
EELDGYEPE

SEQ ID NO: 141310 - protein, 9 aa, Homo sapiens
ELDGYEPEP

SEQ ID NO: 141311 - protein, 9 aa, Homo sapiens
LDGYEPEPL

SEQ ID NO: 141312 - protein, 9 aa, Homo sapiens
DGYEPEPLG

SEQ ID NO: 141313 - protein, 9 aa, Homo sapiens
GYEPEPLGK

SEQ ID NO: 141314 - protein, 9 aa, Homo sapiens
YEPEPLGKR

SEQ ID NO: 141315 - protein, 9 aa, Homo sapiens
EPEPLGKRP

SEQ ID NO: 141316 - protein, 9 aa, Homo sapiens
PEPLGKRPA

SEQ ID NO: 141317 - protein, 9 aa, Homo sapiens
EPLGKRPAV

SEQ ID NO: 141318 - protein, 9 aa, Homo sapiens
PLGKRPAVL

SEQ ID NO: 141319 - protein, 9 aa, Homo sapiens
LGKRPAVLP

SEQ ID NO: 141320 - protein, 9 aa, Homo sapiens
GKRPAVLPL

SEQ ID NO: 141321 - protein, 9 aa, Homo sapiens
KRPAVLPLL

SEQ ID NO: 141322 - protein, 9 aa, Homo sapiens
RPAVLPLLE

SEQ ID NO: 141323 - protein, 9 aa, Homo sapiens
PAVLPLLEL

SEQ ID NO: 141324 - protein, 9 aa, Homo sapiens
AVLPLLELV

SEQ ID NO: 141325 - protein, 9 aa, Homo sapiens
VLPLLELVG

SEQ ID NO: 141326 - protein, 9 aa, Homo sapiens
LPLLELVGE

SEQ ID NO: 141327 - protein, 9 aa, Homo sapiens
PLLELVGES

SEQ ID NO: 141328 - protein, 9 aa, Homo sapiens
LLELVGESG

SEQ ID NO: 141329 - protein, 9 aa, Homo sapiens
LELVGESGN

SEQ ID NO: 141330 - protein, 9 aa, Homo sapiens
ELVGESGNN

SEQ ID NO: 141331 - protein, 9 aa, Homo sapiens
LVGESGNNT

SEQ ID NO: 141332 - protein, 9 aa, Homo sapiens
VGESGNNTS

SEQ ID NO: 141333 - protein, 9 aa, Homo sapiens
GESGNNTST

SEQ ID NO: 141334 - protein, 9 aa, Homo sapiens
ESGNNTSTD

SEQ ID NO: 141335 - protein, 9 aa, Homo sapiens
SGNNTSTDG

SEQ ID NO: 141336 - protein, 9 aa, Homo sapiens
GNNTSTDGS

SEQ ID NO: 141337 - protein, 9 aa, Homo sapiens
NNTSTDGSL

SEQ ID NO: 141338 - protein, 9 aa, Homo sapiens
NTSTDGSLP

SEQ ID NO: 141339 - protein, 9 aa, Homo sapiens
TSTDGSLPS

SEQ ID NO: 141340 - protein, 9 aa, Homo sapiens
STDGSLPST

SEQ ID NO: 141341 - protein, 9 aa, Homo sapiens
TDGSLPSTP

SEQ ID NO: 141342 - protein, 9 aa, Homo sapiens
DGSLPSTPP

SEQ ID NO: 141343 - protein, 9 aa, Homo sapiens
GSLPSTPPP

SEQ ID NO: 141344 - protein, 9 aa, Homo sapiens
SLPSTPPPA

SEQ ID NO: 141345 - protein, 9 aa, Homo sapiens
LPSTPPPAE

SEQ ID NO: 141346 - protein, 9 aa, Homo sapiens
PSTPPPAEE

SEQ ID NO: 141347 - protein, 9 aa, Homo sapiens
STPPPAEEE

SEQ ID NO: 141348 - protein, 9 aa, Homo sapiens
TPPPAEEEE

SEQ ID NO: 141349 - protein, 9 aa, Homo sapiens
PPPAEEEED

SEQ ID NO: 141350 - protein, 9 aa, Homo sapiens
PPAEEEEDD

SEQ ID NO: 141351 - protein, 9 aa, Homo sapiens
PAEEEEDDL

SEQ ID NO: 141352 - protein, 9 aa, Homo sapiens
AEEEEDDLY

SEQ ID NO: 141353 - protein, 9 aa, Homo sapiens
EEEEDDLYR

SEQ ID NO: 141354 - protein, 9 aa, Homo sapiens
EEEDDLYRQ

SEQ ID NO: 141355 - protein, 9 aa, Homo sapiens
EEDDLYRQS

SEQ ID NO: 141356 - protein, 9 aa, Homo sapiens
EDDLYRQSL

SEQ ID NO: 141357 - protein, 9 aa, Homo sapiens
DDLYRQSLE

SEQ ID NO: 141358 - protein, 9 aa, Homo sapiens
DLYRQSLEI

SEQ ID NO: 141359 - protein, 9 aa, Homo sapiens
LYRQSLEII

SEQ ID NO: 141360 - protein, 9 aa, Homo sapiens
YRQSLEIIS

SEQ ID NO: 141361 - protein, 9 aa, Homo sapiens
RQSLEIISR

SEQ ID NO: 141362 - protein, 9 aa, Homo sapiens
QSLEIISRY

SEQ ID NO: 141363 - protein, 9 aa, Homo sapiens
SLEIISRYL

SEQ ID NO: 141364 - protein, 9 aa, Homo sapiens
LEIISRYLR

SEQ ID NO: 141365 - protein, 9 aa, Homo sapiens
EIISRYLRE

SEQ ID NO: 141366 - protein, 9 aa, Homo sapiens
IISRYLREQ

SEQ ID NO: 141367 - protein, 9 aa, Homo sapiens
ISRYLREQA

SEQ ID NO: 141368 - protein, 9 aa, Homo sapiens
SRYLREQAT

SEQ ID NO: 141369 - protein, 9 aa, Homo sapiens
RYLREQATG

SEQ ID NO: 141370 - protein, 9 aa, Homo sapiens
YLREQATGA

SEQ ID NO: 141371 - protein, 9 aa, Homo sapiens
LREQATGAK

SEQ ID NO: 141372 - protein, 9 aa, Homo sapiens
REQATGAKD

SEQ ID NO: 141373 - protein, 9 aa, Homo sapiens
EQATGAKDT

SEQ ID NO: 141374 - protein, 9 aa, Homo sapiens
QATGAKDTK

SEQ ID NO: 141375 - protein, 9 aa, Homo sapiens
ATGAKDTKP

SEQ ID NO: 141376 - protein, 9 aa, Homo sapiens
TGAKDTKPM

SEQ ID NO: 141377 - protein, 9 aa, Homo sapiens
GAKDTKPMG

SEQ ID NO: 141378 - protein, 9 aa, Homo sapiens
AKDTKPMGR

SEQ ID NO: 141379 - protein, 9 aa, Homo sapiens
KDTKPMGRS

SEQ ID NO: 141380 - protein, 9 aa, Homo sapiens
DTKPMGRSG

SEQ ID NO: 141381 - protein, 9 aa, Homo sapiens
TKPMGRSGA

SEQ ID NO: 141382 - protein, 9 aa, Homo sapiens
KPMGRSGAT

SEQ ID NO: 141383 - protein, 9 aa, Homo sapiens
PMGRSGATS

SEQ ID NO: 141384 - protein, 9 aa, Homo sapiens
MGRSGATSR

SEQ ID NO: 141385 - protein, 9 aa, Homo sapiens
GRSGATSRK

SEQ ID NO: 141386 - protein, 9 aa, Homo sapiens
RSGATSRKA

SEQ ID NO: 141387 - protein, 9 aa, Homo sapiens
SGATSRKAL

SEQ ID NO: 141388 - protein, 9 aa, Homo sapiens
GATSRKALE

SEQ ID NO: 141389 - protein, 9 aa, Homo sapiens
ATSRKALET

SEQ ID NO: 141390 - protein, 9 aa, Homo sapiens
TSRKALETL

SEQ ID NO: 141391 - protein, 9 aa, Homo sapiens
SRKALETLR

SEQ ID NO: 141392 - protein, 9 aa, Homo sapiens
RKALETLRR

SEQ ID NO: 141393 - protein, 9 aa, Homo sapiens
KALETLRRV

SEQ ID NO: 141394 - protein, 9 aa, Homo sapiens
ALETLRRVG

SEQ ID NO: 141395 - protein, 9 aa, Homo sapiens
LETLRRVGD

SEQ ID NO: 141396 - protein, 9 aa, Homo sapiens
ETLRRVGDG

SEQ ID NO: 141397 - protein, 9 aa, Homo sapiens
TLRRVGDGV

SEQ ID NO: 141398 - protein, 9 aa, Homo sapiens
LRRVGDGVQ

SEQ ID NO: 141399 - protein, 9 aa, Homo sapiens
RRVGDGVQR

SEQ ID NO: 141400 - protein, 9 aa, Homo sapiens
RVGDGVQRN

SEQ ID NO: 141401 - protein, 9 aa, Homo sapiens
VGDGVQRNH

SEQ ID NO: 141402 - protein, 9 aa, Homo sapiens
GDGVQRNHE

SEQ ID NO: 141403 - protein, 9 aa, Homo sapiens
DGVQRNHET

SEQ ID NO: 141404 - protein, 9 aa, Homo sapiens
GVQRNHETA

SEQ ID NO: 141405 - protein, 9 aa, Homo sapiens
VQRNHETAF

SEQ ID NO: 141406 - protein, 9 aa, Homo sapiens
QRNHETAFQ

SEQ ID NO: 141407 - protein, 9 aa, Homo sapiens
RNHETAFQG

SEQ ID NO: 141408 - protein, 9 aa, Homo sapiens
NHETAFQGM

SEQ ID NO: 141409 - protein, 9 aa, Homo sapiens
HETAFQGML

SEQ ID NO: 141410 - protein, 9 aa, Homo sapiens
ETAFQGMLR

SEQ ID NO: 141411 - protein, 9 aa, Homo sapiens
TAFQGMLRK

SEQ ID NO: 141412 - protein, 9 aa, Homo sapiens
AFQGMLRKL

SEQ ID NO: 141413 - protein, 9 aa, Homo sapiens
FQGMLRKLD

SEQ ID NO: 141414 - protein, 9 aa, Homo sapiens
QGMLRKLDI

SEQ ID NO: 141415 - protein, 9 aa, Homo sapiens
GMLRKLDIK

SEQ ID NO: 141416 - protein, 9 aa, Homo sapiens
MLRKLDIKN

SEQ ID NO: 141417 - protein, 9 aa, Homo sapiens
LRKLDIKNE

SEQ ID NO: 141418 - protein, 9 aa, Homo sapiens
RKLDIKNED

SEQ ID NO: 141419 - protein, 9 aa, Homo sapiens
KLDIKNEDD

SEQ ID NO: 141420 - protein, 9 aa, Homo sapiens
LDIKNEDDV

SEQ ID NO: 141421 - protein, 9 aa, Homo sapiens
DIKNEDDVK

SEQ ID NO: 141422 - protein, 9 aa, Homo sapiens
IKNEDDVKS

SEQ ID NO: 141423 - protein, 9 aa, Homo sapiens
KNEDDVKSL

SEQ ID NO: 141424 - protein, 9 aa, Homo sapiens
NEDDVKSLS

SEQ ID NO: 141425 - protein, 9 aa, Homo sapiens
EDDVKSLSR

SEQ ID NO: 141426 - protein, 9 aa, Homo sapiens
DDVKSLSRV

SEQ ID NO: 141427 - protein, 9 aa, Homo sapiens
DVKSLSRVM

SEQ ID NO: 141428 - protein, 9 aa, Homo sapiens
VKSLSRVMI

SEQ ID NO: 141429 - protein, 9 aa, Homo sapiens
KSLSRVMIH

SEQ ID NO: 141430 - protein, 9 aa, Homo sapiens
SLSRVMIHV

SEQ ID NO: 141431 - protein, 9 aa, Homo sapiens
LSRVMIHVF

SEQ ID NO: 141432 - protein, 9 aa, Homo sapiens
SRVMIHVFS

SEQ ID NO: 141433 - protein, 9 aa, Homo sapiens
RVMIHVFSD

SEQ ID NO: 141434 - protein, 9 aa, Homo sapiens
VMIHVFSDG

SEQ ID NO: 141435 - protein, 9 aa, Homo sapiens
MIHVFSDGV

SEQ ID NO: 141436 - protein, 9 aa, Homo sapiens
IHVFSDGVT

SEQ ID NO: 141437 - protein, 9 aa, Homo sapiens
HVFSDGVTN

SEQ ID NO: 141438 - protein, 9 aa, Homo sapiens
VFSDGVTNW

SEQ ID NO: 141439 - protein, 9 aa, Homo sapiens
FSDGVTNWG

SEQ ID NO: 141440 - protein, 9 aa, Homo sapiens
SDGVTNWGR

SEQ ID NO: 141441 - protein, 9 aa, Homo sapiens
DGVTNWGRI

SEQ ID NO: 141442 - protein, 9 aa, Homo sapiens
GVTNWGRIV

SEQ ID NO: 141443 - protein, 9 aa, Homo sapiens
VTNWGRIVT

SEQ ID NO: 141444 - protein, 9 aa, Homo sapiens
TNWGRIVTL

SEQ ID NO: 141445 - protein, 9 aa, Homo sapiens
NWGRIVTLI

SEQ ID NO: 141446 - protein, 9 aa, Homo sapiens
WGRIVTLIS

SEQ ID NO: 141447 - protein, 9 aa, Homo sapiens
GRIVTLISF

SEQ ID NO: 141448 - protein, 9 aa, Homo sapiens
RIVTLISFG

SEQ ID NO: 141449 - protein, 9 aa, Homo sapiens
IVTLISFGA

SEQ ID NO: 141450 - protein, 9 aa, Homo sapiens
VTLISFGAF

SEQ ID NO: 141451 - protein, 9 aa, Homo sapiens
TLISFGAFV

SEQ ID NO: 141452 - protein, 9 aa, Homo sapiens
LISFGAFVA

SEQ ID NO: 141453 - protein, 9 aa, Homo sapiens
ISFGAFVAK

SEQ ID NO: 141454 - protein, 9 aa, Homo sapiens
SFGAFVAKH

SEQ ID NO: 141455 - protein, 9 aa, Homo sapiens
FGAFVAKHL

SEQ ID NO: 141456 - protein, 9 aa, Homo sapiens
GAFVAKHLK

SEQ ID NO: 141457 - protein, 9 aa, Homo sapiens
AFVAKHLKT

SEQ ID NO: 141458 - protein, 9 aa, Homo sapiens
FVAKHLKTI

SEQ ID NO: 141459 - protein, 9 aa, Homo sapiens
VAKHLKTIN

SEQ ID NO: 141460 - protein, 9 aa, Homo sapiens
AKHLKTINQ

SEQ ID NO: 141461 - protein, 9 aa, Homo sapiens
KHLKTINQE

SEQ ID NO: 141462 - protein, 9 aa, Homo sapiens
HLKTINQES

SEQ ID NO: 141463 - protein, 9 aa, Homo sapiens
LKTINQESC

SEQ ID NO: 141464 - protein, 9 aa, Homo sapiens
KTINQESCI

SEQ ID NO: 141465 - protein, 9 aa, Homo sapiens
TINQESCIE

SEQ ID NO: 141466 - protein, 9 aa, Homo sapiens
INQESCIEP

SEQ ID NO: 141467 - protein, 9 aa, Homo sapiens
NQESCIEPL

SEQ ID NO: 141468 - protein, 9 aa, Homo sapiens
QESCIEPLA

SEQ ID NO: 141469 - protein, 9 aa, Homo sapiens
ESCIEPLAE

SEQ ID NO: 141470 - protein, 9 aa, Homo sapiens
SCIEPLAES

SEQ ID NO: 141471 - protein, 9 aa, Homo sapiens
CIEPLAESI

SEQ ID NO: 141472 - protein, 9 aa, Homo sapiens
IEPLAESIT

SEQ ID NO: 141473 - protein, 9 aa, Homo sapiens
EPLAESITD

SEQ ID NO: 141474 - protein, 9 aa, Homo sapiens
PLAESITDV

SEQ ID NO: 141475 - protein, 9 aa, Homo sapiens
LAESITDVL

SEQ ID NO: 141476 - protein, 9 aa, Homo sapiens
AESITDVLV

SEQ ID NO: 141477 - protein, 9 aa, Homo sapiens
ESITDVLVR

SEQ ID NO: 141478 - protein, 9 aa, Homo sapiens
SITDVLVRT

SEQ ID NO: 141479 - protein, 9 aa, Homo sapiens
ITDVLVRTK

SEQ ID NO: 141480 - protein, 9 aa, Homo sapiens
TDVLVRTKR

SEQ ID NO: 141481 - protein, 9 aa, Homo sapiens
DVLVRTKRD

SEQ ID NO: 141482 - protein, 9 aa, Homo sapiens
VLVRTKRDW

SEQ ID NO: 141483 - protein, 9 aa, Homo sapiens
LVRTKRDWL

SEQ ID NO: 141484 - protein, 9 aa, Homo sapiens
VRTKRDWLV

SEQ ID NO: 141485 - protein, 9 aa, Homo sapiens
RTKRDWLVK

SEQ ID NO: 141486 - protein, 9 aa, Homo sapiens
TKRDWLVKQ

SEQ ID NO: 141487 - protein, 9 aa, Homo sapiens
KRDWLVKQR

SEQ ID NO: 141488 - protein, 9 aa, Homo sapiens
RDWLVKQRG

SEQ ID NO: 141489 - protein, 9 aa, Homo sapiens
DWLVKQRGW

SEQ ID NO: 141490 - protein, 9 aa, Homo sapiens
WLVKQRGWD

SEQ ID NO: 141491 - protein, 9 aa, Homo sapiens
LVKQRGWDG

SEQ ID NO: 141492 - protein, 9 aa, Homo sapiens
VKQRGWDGF

SEQ ID NO: 141493 - protein, 9 aa, Homo sapiens
KQRGWDGFV

SEQ ID NO: 141494 - protein, 9 aa, Homo sapiens
QRGWDGFVE

SEQ ID NO: 141495 - protein, 9 aa, Homo sapiens
RGWDGFVEF

SEQ ID NO: 141496 - protein, 9 aa, Homo sapiens
GWDGFVEFF

SEQ ID NO: 141497 - protein, 9 aa, Homo sapiens
WDGFVEFFH

SEQ ID NO: 141498 - protein, 9 aa, Homo sapiens
DGFVEFFHV

SEQ ID NO: 141499 - protein, 9 aa, Homo sapiens
GFVEFFHVE

SEQ ID NO: 141500 - protein, 9 aa, Homo sapiens
FVEFFHVED

SEQ ID NO: 141501 - protein, 9 aa, Homo sapiens
VEFFHVEDL

SEQ ID NO: 141502 - protein, 9 aa, Homo sapiens
EFFHVEDLE

SEQ ID NO: 141503 - protein, 9 aa, Homo sapiens
FFHVEDLEG

SEQ ID NO: 141504 - protein, 9 aa, Homo sapiens
FHVEDLEGG

SEQ ID NO: 141505 - protein, 9 aa, Homo sapiens
HVEDLEGGI

SEQ ID NO: 141506 - protein, 9 aa, Homo sapiens
VEDLEGGIR

SEQ ID NO: 141507 - protein, 9 aa, Homo sapiens
EDLEGGIRN

SEQ ID NO: 141508 - protein, 9 aa, Homo sapiens
DLEGGIRNV

SEQ ID NO: 141509 - protein, 9 aa, Homo sapiens
LEGGIRNVL

SEQ ID NO: 141510 - protein, 9 aa, Homo sapiens
EGGIRNVLL

SEQ ID NO: 141511 - protein, 9 aa, Homo sapiens
GGIRNVLLA

SEQ ID NO: 141512 - protein, 9 aa, Homo sapiens
GIRNVLLAF

SEQ ID NO: 141513 - protein, 9 aa, Homo sapiens
IRNVLLAFA

SEQ ID NO: 141514 - protein, 9 aa, Homo sapiens
RNVLLAFAG

SEQ ID NO: 141515 - protein, 9 aa, Homo sapiens
NVLLAFAGV

SEQ ID NO: 141516 - protein, 9 aa, Homo sapiens
VLLAFAGVA

SEQ ID NO: 141517 - protein, 9 aa, Homo sapiens
LLAFAGVAG

SEQ ID NO: 141518 - protein, 9 aa, Homo sapiens
LAFAGVAGV

SEQ ID NO: 141519 - protein, 9 aa, Homo sapiens
AFAGVAGVG

SEQ ID NO: 141520 - protein, 9 aa, Homo sapiens
FAGVAGVGA

SEQ ID NO: 141521 - protein, 9 aa, Homo sapiens
AGVAGVGAG

SEQ ID NO: 141522 - protein, 9 aa, Homo sapiens
GVAGVGAGL

SEQ ID NO: 141523 - protein, 9 aa, Homo sapiens
VAGVGAGLA

SEQ ID NO: 141524 - protein, 9 aa, Homo sapiens
AGVGAGLAY

SEQ ID NO: 141525 - protein, 9 aa, Homo sapiens
GVGAGLAYL

SEQ ID NO: 141526 - protein, 9 aa, Homo sapiens
VGAGLAYLI

SEQ ID NO: 141527 - protein, 9 aa, Homo sapiens
GAGLAYLIR

SEQ ID NO: 141528 - protein, 8 aa, Homo sapiens
AGLAYLIR

SEQ ID NO: 141529 - protein, 9 aa, Homo sapiens
MSQSNRELV

SEQ ID NO: 141530 - protein, 9 aa, Homo sapiens
SQSNRELVV

SEQ ID NO: 141531 - protein, 9 aa, Homo sapiens
QSNRELVVD

SEQ ID NO: 141532 - protein, 9 aa, Homo sapiens
SNRELVVDF

SEQ ID NO: 141533 - protein, 9 aa, Homo sapiens
NRELVVDFL

SEQ ID NO: 141534 - protein, 9 aa, Homo sapiens
RELVVDFLS

SEQ ID NO: 141535 - protein, 9 aa, Homo sapiens
ELVVDFLSY

SEQ ID NO: 141536 - protein, 9 aa, Homo sapiens
LVVDFLSYK

SEQ ID NO: 141537 - protein, 9 aa, Homo sapiens
VVDFLSYKL

SEQ ID NO: 141538 - protein, 9 aa, Homo sapiens
VDFLSYKLS

SEQ ID NO: 141539 - protein, 9 aa, Homo sapiens
DFLSYKLSQ

SEQ ID NO: 141540 - protein, 9 aa, Homo sapiens
FLSYKLSQK

SEQ ID NO: 141541 - protein, 9 aa, Homo sapiens
LSYKLSQKG

SEQ ID NO: 141542 - protein, 9 aa, Homo sapiens
SYKLSQKGY

SEQ ID NO: 141543 - protein, 9 aa, Homo sapiens
YKLSQKGYS

SEQ ID NO: 141544 - protein, 9 aa, Homo sapiens
KLSQKGYSW

SEQ ID NO: 141545 - protein, 9 aa, Homo sapiens
LSQKGYSWS

SEQ ID NO: 141546 - protein, 9 aa, Homo sapiens
SQKGYSWSQ

SEQ ID NO: 141547 - protein, 9 aa, Homo sapiens
QKGYSWSQF

SEQ ID NO: 141548 - protein, 9 aa, Homo sapiens
KGYSWSQFS

SEQ ID NO: 141549 - protein, 9 aa, Homo sapiens
GYSWSQFSD

SEQ ID NO: 141550 - protein, 9 aa, Homo sapiens
YSWSQFSDV

SEQ ID NO: 141551 - protein, 9 aa, Homo sapiens
SWSQFSDVE

SEQ ID NO: 141552 - protein, 9 aa, Homo sapiens
WSQFSDVEE

SEQ ID NO: 141553 - protein, 9 aa, Homo sapiens
SQFSDVEEN

SEQ ID NO: 141554 - protein, 9 aa, Homo sapiens
QFSDVEENR

SEQ ID NO: 141555 - protein, 9 aa, Homo sapiens
FSDVEENRT

SEQ ID NO: 141556 - protein, 9 aa, Homo sapiens
SDVEENRTE

SEQ ID NO: 141557 - protein, 9 aa, Homo sapiens
DVEENRTEA

SEQ ID NO: 141558 - protein, 9 aa, Homo sapiens
VEENRTEAP

SEQ ID NO: 141559 - protein, 9 aa, Homo sapiens
EENRTEAPE

SEQ ID NO: 141560 - protein, 9 aa, Homo sapiens
ENRTEAPEG

SEQ ID NO: 141561 - protein, 9 aa, Homo sapiens
NRTEAPEGT

SEQ ID NO: 141562 - protein, 9 aa, Homo sapiens
RTEAPEGTE

SEQ ID NO: 141563 - protein, 9 aa, Homo sapiens
TEAPEGTES

SEQ ID NO: 141564 - protein, 9 aa, Homo sapiens
EAPEGTESE

SEQ ID NO: 141565 - protein, 9 aa, Homo sapiens
APEGTESEM

SEQ ID NO: 141566 - protein, 9 aa, Homo sapiens
PEGTESEME

SEQ ID NO: 141567 - protein, 9 aa, Homo sapiens
EGTESEMET

SEQ ID NO: 141568 - protein, 9 aa, Homo sapiens
GTESEMETP

SEQ ID NO: 141569 - protein, 9 aa, Homo sapiens
TESEMETPS

SEQ ID NO: 141570 - protein, 9 aa, Homo sapiens
ESEMETPSA

SEQ ID NO: 141571 - protein, 9 aa, Homo sapiens
SEMETPSAI

SEQ ID NO: 141572 - protein, 9 aa, Homo sapiens
EMETPSAIN

SEQ ID NO: 141573 - protein, 9 aa, Homo sapiens
METPSAING

SEQ ID NO: 141574 - protein, 9 aa, Homo sapiens
ETPSAINGN

SEQ ID NO: 141575 - protein, 9 aa, Homo sapiens
TPSAINGNP

SEQ ID NO: 141576 - protein, 9 aa, Homo sapiens
PSAINGNPS

SEQ ID NO: 141577 - protein, 9 aa, Homo sapiens
SAINGNPSW

SEQ ID NO: 141578 - protein, 9 aa, Homo sapiens
AINGNPSWH

SEQ ID NO: 141579 - protein, 9 aa, Homo sapiens
INGNPSWHL

SEQ ID NO: 141580 - protein, 9 aa, Homo sapiens
NGNPSWHLA

SEQ ID NO: 141581 - protein, 9 aa, Homo sapiens
GNPSWHLAD

SEQ ID NO: 141582 - protein, 9 aa, Homo sapiens
NPSWHLADS

SEQ ID NO: 141583 - protein, 9 aa, Homo sapiens
PSWHLADSP

SEQ ID NO: 141584 - protein, 9 aa, Homo sapiens
SWHLADSPA

SEQ ID NO: 141585 - protein, 9 aa, Homo sapiens
WHLADSPAV

SEQ ID NO: 141586 - protein, 9 aa, Homo sapiens
HLADSPAVN

SEQ ID NO: 141587 - protein, 9 aa, Homo sapiens
LADSPAVNG

SEQ ID NO: 141588 - protein, 9 aa, Homo sapiens
ADSPAVNGA

SEQ ID NO: 141589 - protein, 9 aa, Homo sapiens
DSPAVNGAT

SEQ ID NO: 141590 - protein, 9 aa, Homo sapiens
SPAVNGATG

SEQ ID NO: 141591 - protein, 9 aa, Homo sapiens
PAVNGATGH

SEQ ID NO: 141592 - protein, 9 aa, Homo sapiens
AVNGATGHS

SEQ ID NO: 141593 - protein, 9 aa, Homo sapiens
VNGATGHSS

SEQ ID NO: 141594 - protein, 9 aa, Homo sapiens
NGATGHSSS

SEQ ID NO: 141595 - protein, 9 aa, Homo sapiens
GATGHSSSL

SEQ ID NO: 141596 - protein, 9 aa, Homo sapiens
ATGHSSSLD

SEQ ID NO: 141597 - protein, 9 aa, Homo sapiens
TGHSSSLDA

SEQ ID NO: 141598 - protein, 9 aa, Homo sapiens
GHSSSLDAR

SEQ ID NO: 141599 - protein, 9 aa, Homo sapiens
HSSSLDARE

SEQ ID NO: 141600 - protein, 9 aa, Homo sapiens
SSSLDAREV

SEQ ID NO: 141601 - protein, 9 aa, Homo sapiens
SSLDAREVI

SEQ ID NO: 141602 - protein, 9 aa, Homo sapiens
SLDAREVIP

SEQ ID NO: 141603 - protein, 9 aa, Homo sapiens
LDAREVIPM

SEQ ID NO: 141604 - protein, 9 aa, Homo sapiens
DAREVIPMA

SEQ ID NO: 141605 - protein, 9 aa, Homo sapiens
AREVIPMAA

SEQ ID NO: 141606 - protein, 9 aa, Homo sapiens
REVIPMAAV

SEQ ID NO: 141607 - protein, 9 aa, Homo sapiens
EVIPMAAVK

SEQ ID NO: 141608 - protein, 9 aa, Homo sapiens
VIPMAAVKQ

SEQ ID NO: 141609 - protein, 9 aa, Homo sapiens
IPMAAVKQA

SEQ ID NO: 141610 - protein, 9 aa, Homo sapiens
PMAAVKQAL

SEQ ID NO: 141611 - protein, 9 aa, Homo sapiens
MAAVKQALR

SEQ ID NO: 141612 - protein, 9 aa, Homo sapiens
AAVKQALRE

SEQ ID NO: 141613 - protein, 9 aa, Homo sapiens
AVKQALREA

SEQ ID NO: 141614 - protein, 9 aa, Homo sapiens
VKQALREAG

SEQ ID NO: 141615 - protein, 9 aa, Homo sapiens
KQALREAGD

SEQ ID NO: 141616 - protein, 9 aa, Homo sapiens
QALREAGDE

SEQ ID NO: 141617 - protein, 9 aa, Homo sapiens
ALREAGDEF

SEQ ID NO: 141618 - protein, 9 aa, Homo sapiens
LREAGDEFE

SEQ ID NO: 141619 - protein, 9 aa, Homo sapiens
REAGDEFEL

SEQ ID NO: 141620 - protein, 9 aa, Homo sapiens
EAGDEFELR

SEQ ID NO: 141621 - protein, 9 aa, Homo sapiens
AGDEFELRY

SEQ ID NO: 141622 - protein, 9 aa, Homo sapiens
GDEFELRYR

SEQ ID NO: 141623 - protein, 9 aa, Homo sapiens
DEFELRYRR

SEQ ID NO: 141624 - protein, 9 aa, Homo sapiens
EFELRYRRA

SEQ ID NO: 141625 - protein, 9 aa, Homo sapiens
FELRYRRAF

SEQ ID NO: 141626 - protein, 9 aa, Homo sapiens
ELRYRRAFS

SEQ ID NO: 141627 - protein, 9 aa, Homo sapiens
LRYRRAFSD

SEQ ID NO: 141628 - protein, 9 aa, Homo sapiens
RYRRAFSDL

SEQ ID NO: 141629 - protein, 9 aa, Homo sapiens
YRRAFSDLT

SEQ ID NO: 141630 - protein, 9 aa, Homo sapiens
RRAFSDLTS

SEQ ID NO: 141631 - protein, 9 aa, Homo sapiens
RAFSDLTSQ

SEQ ID NO: 141632 - protein, 9 aa, Homo sapiens
AFSDLTSQL

SEQ ID NO: 141633 - protein, 9 aa, Homo sapiens
FSDLTSQLH

SEQ ID NO: 141634 - protein, 9 aa, Homo sapiens
SDLTSQLHI

SEQ ID NO: 141635 - protein, 9 aa, Homo sapiens
DLTSQLHIT

SEQ ID NO: 141636 - protein, 9 aa, Homo sapiens
LTSQLHITP

SEQ ID NO: 141637 - protein, 9 aa, Homo sapiens
TSQLHITPG

SEQ ID NO: 141638 - protein, 9 aa, Homo sapiens
SQLHITPGT

SEQ ID NO: 141639 - protein, 9 aa, Homo sapiens
QLHITPGTA

SEQ ID NO: 141640 - protein, 9 aa, Homo sapiens
LHITPGTAY

SEQ ID NO: 141641 - protein, 9 aa, Homo sapiens
HITPGTAYQ

SEQ ID NO: 141642 - protein, 9 aa, Homo sapiens
ITPGTAYQS

SEQ ID NO: 141643 - protein, 9 aa, Homo sapiens
TPGTAYQSF

SEQ ID NO: 141644 - protein, 9 aa, Homo sapiens
PGTAYQSFE

SEQ ID NO: 141645 - protein, 9 aa, Homo sapiens
GTAYQSFEQ

SEQ ID NO: 141646 - protein, 9 aa, Homo sapiens
TAYQSFEQV

SEQ ID NO: 141647 - protein, 9 aa, Homo sapiens
AYQSFEQVV

SEQ ID NO: 141648 - protein, 9 aa, Homo sapiens
YQSFEQVVN

SEQ ID NO: 141649 - protein, 9 aa, Homo sapiens
QSFEQVVNE

SEQ ID NO: 141650 - protein, 9 aa, Homo sapiens
SFEQVVNEL

SEQ ID NO: 141651 - protein, 9 aa, Homo sapiens
FEQVVNELF

SEQ ID NO: 141652 - protein, 9 aa, Homo sapiens
EQVVNELFR

SEQ ID NO: 141653 - protein, 9 aa, Homo sapiens
QVVNELFRD

SEQ ID NO: 141654 - protein, 9 aa, Homo sapiens
VVNELFRDG

SEQ ID NO: 141655 - protein, 9 aa, Homo sapiens
VNELFRDGV

SEQ ID NO: 141656 - protein, 9 aa, Homo sapiens
NELFRDGVN

SEQ ID NO: 141657 - protein, 9 aa, Homo sapiens
ELFRDGVNW

SEQ ID NO: 141658 - protein, 9 aa, Homo sapiens
LFRDGVNWG

SEQ ID NO: 141659 - protein, 9 aa, Homo sapiens
FRDGVNWGR

SEQ ID NO: 141660 - protein, 9 aa, Homo sapiens
RDGVNWGRI

SEQ ID NO: 141661 - protein, 9 aa, Homo sapiens
DGVNWGRIV

SEQ ID NO: 141662 - protein, 9 aa, Homo sapiens
GVNWGRIVA

SEQ ID NO: 141663 - protein, 9 aa, Homo sapiens
VNWGRIVAF

SEQ ID NO: 141664 - protein, 9 aa, Homo sapiens
NWGRIVAFF

SEQ ID NO: 141665 - protein, 9 aa, Homo sapiens
WGRIVAFFS

SEQ ID NO: 141666 - protein, 9 aa, Homo sapiens
GRIVAFFSF

SEQ ID NO: 141667 - protein, 9 aa, Homo sapiens
RIVAFFSFG

SEQ ID NO: 141668 - protein, 9 aa, Homo sapiens
IVAFFSFGG

SEQ ID NO: 141669 - protein, 9 aa, Homo sapiens
VAFFSFGGA

SEQ ID NO: 141670 - protein, 9 aa, Homo sapiens
AFFSFGGAL

SEQ ID NO: 141671 - protein, 9 aa, Homo sapiens
FFSFGGALC

SEQ ID NO: 141672 - protein, 9 aa, Homo sapiens
FSFGGALCV

SEQ ID NO: 141673 - protein, 9 aa, Homo sapiens
SFGGALCVE

SEQ ID NO: 141674 - protein, 9 aa, Homo sapiens
FGGALCVES

SEQ ID NO: 141675 - protein, 9 aa, Homo sapiens
GGALCVESV

SEQ ID NO: 141676 - protein, 9 aa, Homo sapiens
GALCVESVD

SEQ ID NO: 141677 - protein, 9 aa, Homo sapiens
ALCVESVDK

SEQ ID NO: 141678 - protein, 9 aa, Homo sapiens
LCVESVDKE

SEQ ID NO: 141679 - protein, 9 aa, Homo sapiens
CVESVDKEM

SEQ ID NO: 141680 - protein, 9 aa, Homo sapiens
VESVDKEMQ

SEQ ID NO: 141681 - protein, 9 aa, Homo sapiens
ESVDKEMQV

SEQ ID NO: 141682 - protein, 9 aa, Homo sapiens
SVDKEMQVL

SEQ ID NO: 141683 - protein, 9 aa, Homo sapiens
VDKEMQVLV

SEQ ID NO: 141684 - protein, 9 aa, Homo sapiens
DKEMQVLVS

SEQ ID NO: 141685 - protein, 9 aa, Homo sapiens
KEMQVLVSR

SEQ ID NO: 141686 - protein, 9 aa, Homo sapiens
EMQVLVSRI

SEQ ID NO: 141687 - protein, 9 aa, Homo sapiens
MQVLVSRIA

SEQ ID NO: 141688 - protein, 9 aa, Homo sapiens
QVLVSRIAA

SEQ ID NO: 141689 - protein, 9 aa, Homo sapiens
VLVSRIAAW

SEQ ID NO: 141690 - protein, 9 aa, Homo sapiens
LVSRIAAWM

SEQ ID NO: 141691 - protein, 9 aa, Homo sapiens
VSRIAAWMA

SEQ ID NO: 141692 - protein, 9 aa, Homo sapiens
SRIAAWMAT

SEQ ID NO: 141693 - protein, 9 aa, Homo sapiens
RIAAWMATY

SEQ ID NO: 141694 - protein, 9 aa, Homo sapiens
IAAWMATYL

SEQ ID NO: 141695 - protein, 9 aa, Homo sapiens
AAWMATYLN

SEQ ID NO: 141696 - protein, 9 aa, Homo sapiens
AWMATYLND

SEQ ID NO: 141697 - protein, 9 aa, Homo sapiens
WMATYLNDH

SEQ ID NO: 141698 - protein, 9 aa, Homo sapiens
MATYLNDHL

SEQ ID NO: 141699 - protein, 9 aa, Homo sapiens
ATYLNDHLE

SEQ ID NO: 141700 - protein, 9 aa, Homo sapiens
TYLNDHLEP

SEQ ID NO: 141701 - protein, 9 aa, Homo sapiens
YLNDHLEPW

SEQ ID NO: 141702 - protein, 9 aa, Homo sapiens
LNDHLEPWI

SEQ ID NO: 141703 - protein, 9 aa, Homo sapiens
NDHLEPWIQ

SEQ ID NO: 141704 - protein, 9 aa, Homo sapiens
DHLEPWIQE

SEQ ID NO: 141705 - protein, 9 aa, Homo sapiens
HLEPWIQEN

SEQ ID NO: 141706 - protein, 9 aa, Homo sapiens
LEPWIQENG

SEQ ID NO: 141707 - protein, 9 aa, Homo sapiens
EPWIQENGG

SEQ ID NO: 141708 - protein, 9 aa, Homo sapiens
PWIQENGGW

SEQ ID NO: 141709 - protein, 9 aa, Homo sapiens
WIQENGGWD

SEQ ID NO: 141710 - protein, 9 aa, Homo sapiens
IQENGGWDT

SEQ ID NO: 141711 - protein, 9 aa, Homo sapiens
QENGGWDTF

SEQ ID NO: 141712 - protein, 9 aa, Homo sapiens
ENGGWDTFV

SEQ ID NO: 141713 - protein, 9 aa, Homo sapiens
NGGWDTFVE

SEQ ID NO: 141714 - protein, 9 aa, Homo sapiens
GGWDTFVEL

SEQ ID NO: 141715 - protein, 9 aa, Homo sapiens
GWDTFVELY

SEQ ID NO: 141716 - protein, 9 aa, Homo sapiens
WDTFVELYG

SEQ ID NO: 141717 - protein, 9 aa, Homo sapiens
DTFVELYGN

SEQ ID NO: 141718 - protein, 9 aa, Homo sapiens
TFVELYGNN

SEQ ID NO: 141719 - protein, 9 aa, Homo sapiens
FVELYGNNA

SEQ ID NO: 141720 - protein, 9 aa, Homo sapiens
VELYGNNAA

SEQ ID NO: 141721 - protein, 9 aa, Homo sapiens
ELYGNNAAA

SEQ ID NO: 141722 - protein, 9 aa, Homo sapiens
LYGNNAAAE

SEQ ID NO: 141723 - protein, 9 aa, Homo sapiens
YGNNAAAES

SEQ ID NO: 141724 - protein, 9 aa, Homo sapiens
GNNAAAESR

SEQ ID NO: 141725 - protein, 9 aa, Homo sapiens
NNAAAESRK

SEQ ID NO: 141726 - protein, 9 aa, Homo sapiens
NAAAESRKG

SEQ ID NO: 141727 - protein, 9 aa, Homo sapiens
AAAESRKGQ

SEQ ID NO: 141728 - protein, 9 aa, Homo sapiens
AAESRKGQE

SEQ ID NO: 141729 - protein, 9 aa, Homo sapiens
AESRKGQER

SEQ ID NO: 141730 - protein, 9 aa, Homo sapiens
ESRKGQERF

SEQ ID NO: 141731 - protein, 9 aa, Homo sapiens
SRKGQERFN

SEQ ID NO: 141732 - protein, 9 aa, Homo sapiens
RKGQERFNR

SEQ ID NO: 141733 - protein, 9 aa, Homo sapiens
KGQERFNRW

SEQ ID NO: 141734 - protein, 9 aa, Homo sapiens
GQERFNRWF

SEQ ID NO: 141735 - protein, 9 aa, Homo sapiens
QERFNRWFL

SEQ ID NO: 141736 - protein, 9 aa, Homo sapiens
ERFNRWFLT

SEQ ID NO: 141737 - protein, 9 aa, Homo sapiens
RFNRWFLTG

SEQ ID NO: 141738 - protein, 9 aa, Homo sapiens
FNRWFLTGM

SEQ ID NO: 141739 - protein, 9 aa, Homo sapiens
NRWFLTGMT

SEQ ID NO: 141740 - protein, 9 aa, Homo sapiens
RWFLTGMTV

SEQ ID NO: 141741 - protein, 9 aa, Homo sapiens
WFLTGMTVA

SEQ ID NO: 141742 - protein, 9 aa, Homo sapiens
FLTGMTVAG

SEQ ID NO: 141743 - protein, 9 aa, Homo sapiens
LTGMTVAGV

SEQ ID NO: 141744 - protein, 9 aa, Homo sapiens
TGMTVAGVV

SEQ ID NO: 141745 - protein, 9 aa, Homo sapiens
GMTVAGVVL

SEQ ID NO: 141746 - protein, 9 aa, Homo sapiens
MTVAGVVLL

SEQ ID NO: 141747 - protein, 9 aa, Homo sapiens
TVAGVVLLG

SEQ ID NO: 141748 - protein, 9 aa, Homo sapiens
VAGVVLLGS

SEQ ID NO: 141749 - protein, 9 aa, Homo sapiens
AGVVLLGSL

SEQ ID NO: 141750 - protein, 9 aa, Homo sapiens
GVVLLGSLF

SEQ ID NO: 141751 - protein, 9 aa, Homo sapiens
VVLLGSLFS

SEQ ID NO: 141752 - protein, 9 aa, Homo sapiens
VLLGSLFSR

SEQ ID NO: 141753 - protein, 9 aa, Homo sapiens
LLGSLFSRK

SEQ ID NO: 141754 - protein, 8 aa, Homo sapiens
LGSLFSRK

SEQ ID NO: 141755 - protein, 7 aa, Homo sapiens
GSLFSRK

SEQ ID NO: 141756 - protein, 9 aa, Homo sapiens
MAHAGRTGY

SEQ ID NO: 141757 - protein, 9 aa, Homo sapiens
AHAGRTGYD

SEQ ID NO: 141758 - protein, 9 aa, Homo sapiens
HAGRTGYDN

SEQ ID NO: 141759 - protein, 9 aa, Homo sapiens
AGRTGYDNR

SEQ ID NO: 141760 - protein, 9 aa, Homo sapiens
GRTGYDNRE

SEQ ID NO: 141761 - protein, 9 aa, Homo sapiens
RTGYDNREI

SEQ ID NO: 141762 - protein, 9 aa, Homo sapiens
TGYDNREIV

SEQ ID NO: 141763 - protein, 9 aa, Homo sapiens
GYDNREIVM

SEQ ID NO: 141764 - protein, 9 aa, Homo sapiens
YDNREIVMK

SEQ ID NO: 141765 - protein, 9 aa, Homo sapiens
DNREIVMKY

SEQ ID NO: 141766 - protein, 9 aa, Homo sapiens
NREIVMKYI

SEQ ID NO: 141767 - protein, 9 aa, Homo sapiens
REIVMKYIH

SEQ ID NO: 141768 - protein, 9 aa, Homo sapiens
EIVMKYIHY

SEQ ID NO: 141769 - protein, 9 aa, Homo sapiens
IVMKYIHYK

SEQ ID NO: 141770 - protein, 9 aa, Homo sapiens
VMKYIHYKL

SEQ ID NO: 141771 - protein, 9 aa, Homo sapiens
MKYIHYKLS

SEQ ID NO: 141772 - protein, 9 aa, Homo sapiens
KYIHYKLSQ

SEQ ID NO: 141773 - protein, 9 aa, Homo sapiens
YIHYKLSQR

SEQ ID NO: 141774 - protein, 9 aa, Homo sapiens
IHYKLSQRG

SEQ ID NO: 141775 - protein, 9 aa, Homo sapiens
HYKLSQRGY

SEQ ID NO: 141776 - protein, 9 aa, Homo sapiens
YKLSQRGYE

SEQ ID NO: 141777 - protein, 9 aa, Homo sapiens
KLSQRGYEW

SEQ ID NO: 141778 - protein, 9 aa, Homo sapiens
LSQRGYEWD

SEQ ID NO: 141779 - protein, 9 aa, Homo sapiens
SQRGYEWDA

SEQ ID NO: 141780 - protein, 9 aa, Homo sapiens
QRGYEWDAG

SEQ ID NO: 141781 - protein, 9 aa, Homo sapiens
RGYEWDAGD

SEQ ID NO: 141782 - protein, 9 aa, Homo sapiens
GYEWDAGDV

SEQ ID NO: 141783 - protein, 9 aa, Homo sapiens
YEWDAGDVG

SEQ ID NO: 141784 - protein, 9 aa, Homo sapiens
EWDAGDVGA

SEQ ID NO: 141785 - protein, 9 aa, Homo sapiens
WDAGDVGAA

SEQ ID NO: 141786 - protein, 9 aa, Homo sapiens
DAGDVGAAP

SEQ ID NO: 141787 - protein, 9 aa, Homo sapiens
AGDVGAAPP

SEQ ID NO: 141788 - protein, 9 aa, Homo sapiens
GDVGAAPPG

SEQ ID NO: 141789 - protein, 9 aa, Homo sapiens
DVGAAPPGA

SEQ ID NO: 141790 - protein, 9 aa, Homo sapiens
VGAAPPGAA

SEQ ID NO: 141791 - protein, 9 aa, Homo sapiens
GAAPPGAAP

SEQ ID NO: 141792 - protein, 9 aa, Homo sapiens
AAPPGAAPA

SEQ ID NO: 141793 - protein, 9 aa, Homo sapiens
APPGAAPAP

SEQ ID NO: 141794 - protein, 9 aa, Homo sapiens
PPGAAPAPG

SEQ ID NO: 141795 - protein, 9 aa, Homo sapiens
PGAAPAPGI

SEQ ID NO: 141796 - protein, 9 aa, Homo sapiens
GAAPAPGIF

SEQ ID NO: 141797 - protein, 9 aa, Homo sapiens
AAPAPGIFS

SEQ ID NO: 141798 - protein, 9 aa, Homo sapiens
APAPGIFSS

SEQ ID NO: 141799 - protein, 9 aa, Homo sapiens
PAPGIFSSQ

SEQ ID NO: 141800 - protein, 9 aa, Homo sapiens
APGIFSSQP

SEQ ID NO: 141801 - protein, 9 aa, Homo sapiens
PGIFSSQPG

SEQ ID NO: 141802 - protein, 9 aa, Homo sapiens
GIFSSQPGH

SEQ ID NO: 141803 - protein, 9 aa, Homo sapiens
IFSSQPGHT

SEQ ID NO: 141804 - protein, 9 aa, Homo sapiens
FSSQPGHTP

SEQ ID NO: 141805 - protein, 9 aa, Homo sapiens
SSQPGHTPH

SEQ ID NO: 141806 - protein, 9 aa, Homo sapiens
SQPGHTPHP

SEQ ID NO: 141807 - protein, 9 aa, Homo sapiens
QPGHTPHPA

SEQ ID NO: 141808 - protein, 9 aa, Homo sapiens
PGHTPHPAA

SEQ ID NO: 141809 - protein, 9 aa, Homo sapiens
GHTPHPAAS

SEQ ID NO: 141810 - protein, 9 aa, Homo sapiens
HTPHPAASR

SEQ ID NO: 141811 - protein, 9 aa, Homo sapiens
TPHPAASRD

SEQ ID NO: 141812 - protein, 9 aa, Homo sapiens
PHPAASRDP

SEQ ID NO: 141813 - protein, 9 aa, Homo sapiens
HPAASRDPV

SEQ ID NO: 141814 - protein, 9 aa, Homo sapiens
PAASRDPVA

SEQ ID NO: 141815 - protein, 9 aa, Homo sapiens
AASRDPVAR

SEQ ID NO: 141816 - protein, 9 aa, Homo sapiens
ASRDPVART

SEQ ID NO: 141817 - protein, 9 aa, Homo sapiens
SRDPVARTS

SEQ ID NO: 141818 - protein, 9 aa, Homo sapiens
RDPVARTSP

SEQ ID NO: 141819 - protein, 9 aa, Homo sapiens
DPVARTSPL

SEQ ID NO: 141820 - protein, 9 aa, Homo sapiens
PVARTSPLQ

SEQ ID NO: 141821 - protein, 9 aa, Homo sapiens
VARTSPLQT

SEQ ID NO: 141822 - protein, 9 aa, Homo sapiens
ARTSPLQTP

SEQ ID NO: 141823 - protein, 9 aa, Homo sapiens
RTSPLQTPA

SEQ ID NO: 141824 - protein, 9 aa, Homo sapiens
TSPLQTPAA

SEQ ID NO: 141825 - protein, 9 aa, Homo sapiens
SPLQTPAAP

SEQ ID NO: 141826 - protein, 9 aa, Homo sapiens
PLQTPAAPG

SEQ ID NO: 141827 - protein, 9 aa, Homo sapiens
LQTPAAPGA

SEQ ID NO: 141828 - protein, 9 aa, Homo sapiens
QTPAAPGAA

SEQ ID NO: 141829 - protein, 9 aa, Homo sapiens
TPAAPGAAA

SEQ ID NO: 141830 - protein, 9 aa, Homo sapiens
PAAPGAAAG

SEQ ID NO: 141831 - protein, 9 aa, Homo sapiens
AAPGAAAGP

SEQ ID NO: 141832 - protein, 9 aa, Homo sapiens
APGAAAGPA

SEQ ID NO: 141833 - protein, 9 aa, Homo sapiens
PGAAAGPAL

SEQ ID NO: 141834 - protein, 9 aa, Homo sapiens
GAAAGPALS

SEQ ID NO: 141835 - protein, 9 aa, Homo sapiens
AAAGPALSP

SEQ ID NO: 141836 - protein, 9 aa, Homo sapiens
AAGPALSPV

SEQ ID NO: 141837 - protein, 9 aa, Homo sapiens
AGPALSPVP

SEQ ID NO: 141838 - protein, 9 aa, Homo sapiens
GPALSPVPP

SEQ ID NO: 141839 - protein, 9 aa, Homo sapiens
PALSPVPPV

SEQ ID NO: 141840 - protein, 9 aa, Homo sapiens
ALSPVPPVV

SEQ ID NO: 141841 - protein, 9 aa, Homo sapiens
LSPVPPVVH

SEQ ID NO: 141842 - protein, 9 aa, Homo sapiens
SPVPPVVHL

SEQ ID NO: 141843 - protein, 9 aa, Homo sapiens
PVPPVVHLT

SEQ ID NO: 141844 - protein, 9 aa, Homo sapiens
VPPVVHLTL

SEQ ID NO: 141845 - protein, 9 aa, Homo sapiens
PPVVHLTLR

SEQ ID NO: 141846 - protein, 9 aa, Homo sapiens
PVVHLTLRQ

SEQ ID NO: 141847 - protein, 9 aa, Homo sapiens
VVHLTLRQA

SEQ ID NO: 141848 - protein, 9 aa, Homo sapiens
VHLTLRQAG

SEQ ID NO: 141849 - protein, 9 aa, Homo sapiens
HLTLRQAGD

SEQ ID NO: 141850 - protein, 9 aa, Homo sapiens
LTLRQAGDD

SEQ ID NO: 141851 - protein, 9 aa, Homo sapiens
TLRQAGDDF

SEQ ID NO: 141852 - protein, 9 aa, Homo sapiens
LRQAGDDFS

SEQ ID NO: 141853 - protein, 9 aa, Homo sapiens
RQAGDDFSR

SEQ ID NO: 141854 - protein, 9 aa, Homo sapiens
QAGDDFSRR

SEQ ID NO: 141855 - protein, 9 aa, Homo sapiens
AGDDFSRRY

SEQ ID NO: 141856 - protein, 9 aa, Homo sapiens
GDDFSRRYR

SEQ ID NO: 141857 - protein, 9 aa, Homo sapiens
DDFSRRYRR

SEQ ID NO: 141858 - protein, 9 aa, Homo sapiens
DFSRRYRRD

SEQ ID NO: 141859 - protein, 9 aa, Homo sapiens
FSRRYRRDF

SEQ ID NO: 141860 - protein, 9 aa, Homo sapiens
SRRYRRDFA

SEQ ID NO: 141861 - protein, 9 aa, Homo sapiens
RRYRRDFAE

SEQ ID NO: 141862 - protein, 9 aa, Homo sapiens
RYRRDFAEM

SEQ ID NO: 141863 - protein, 9 aa, Homo sapiens
YRRDFAEMS

SEQ ID NO: 141864 - protein, 9 aa, Homo sapiens
RRDFAEMSS

SEQ ID NO: 141865 - protein, 9 aa, Homo sapiens
RDFAEMSSQ

SEQ ID NO: 141866 - protein, 9 aa, Homo sapiens
DFAEMSSQL

SEQ ID NO: 141867 - protein, 9 aa, Homo sapiens
FAEMSSQLH

SEQ ID NO: 141868 - protein, 9 aa, Homo sapiens
AEMSSQLHL

SEQ ID NO: 141869 - protein, 9 aa, Homo sapiens
EMSSQLHLT

SEQ ID NO: 141870 - protein, 9 aa, Homo sapiens
MSSQLHLTP

SEQ ID NO: 141871 - protein, 9 aa, Homo sapiens
SSQLHLTPF

SEQ ID NO: 141872 - protein, 9 aa, Homo sapiens
SQLHLTPFT

SEQ ID NO: 141873 - protein, 9 aa, Homo sapiens
QLHLTPFTA

SEQ ID NO: 141874 - protein, 9 aa, Homo sapiens
LHLTPFTAR

SEQ ID NO: 141875 - protein, 9 aa, Homo sapiens
HLTPFTARG

SEQ ID NO: 141876 - protein, 9 aa, Homo sapiens
LTPFTARGR

SEQ ID NO: 141877 - protein, 9 aa, Homo sapiens
TPFTARGRF

SEQ ID NO: 141878 - protein, 9 aa, Homo sapiens
PFTARGRFA

SEQ ID NO: 141879 - protein, 9 aa, Homo sapiens
FTARGRFAT

SEQ ID NO: 141880 - protein, 9 aa, Homo sapiens
TARGRFATV

SEQ ID NO: 141881 - protein, 9 aa, Homo sapiens
ARGRFATVV

SEQ ID NO: 141882 - protein, 9 aa, Homo sapiens
RGRFATVVE

SEQ ID NO: 141883 - protein, 9 aa, Homo sapiens
GRFATVVEE

SEQ ID NO: 141884 - protein, 9 aa, Homo sapiens
RFATVVEEL

SEQ ID NO: 141885 - protein, 9 aa, Homo sapiens
FATVVEELF

SEQ ID NO: 141886 - protein, 9 aa, Homo sapiens
ATVVEELFR

SEQ ID NO: 141887 - protein, 9 aa, Homo sapiens
TVVEELFRD

SEQ ID NO: 141888 - protein, 9 aa, Homo sapiens
VVEELFRDG

SEQ ID NO: 141889 - protein, 9 aa, Homo sapiens
VEELFRDGV

SEQ ID NO: 141890 - protein, 9 aa, Homo sapiens
EELFRDGVN

SEQ ID NO: 141891 - protein, 9 aa, Homo sapiens
ELFRDGVNW

SEQ ID NO: 141892 - protein, 9 aa, Homo sapiens
LFRDGVNWG

SEQ ID NO: 141893 - protein, 9 aa, Homo sapiens
FRDGVNWGR

SEQ ID NO: 141894 - protein, 9 aa, Homo sapiens
RDGVNWGRI

SEQ ID NO: 141895 - protein, 9 aa, Homo sapiens
DGVNWGRIV

SEQ ID NO: 141896 - protein, 9 aa, Homo sapiens
GVNWGRIVA

SEQ ID NO: 141897 - protein, 9 aa, Homo sapiens
VNWGRIVAF

SEQ ID NO: 141898 - protein, 9 aa, Homo sapiens
NWGRIVAFF

SEQ ID NO: 141899 - protein, 9 aa, Homo sapiens
WGRIVAFFE

SEQ ID NO: 141900 - protein, 9 aa, Homo sapiens
GRIVAFFEF

SEQ ID NO: 141901 - protein, 9 aa, Homo sapiens
RIVAFFEFG

SEQ ID NO: 141902 - protein, 9 aa, Homo sapiens
IVAFFEFGG

SEQ ID NO: 141903 - protein, 9 aa, Homo sapiens
VAFFEFGGV

SEQ ID NO: 141904 - protein, 9 aa, Homo sapiens
AFFEFGGVM

SEQ ID NO: 141905 - protein, 9 aa, Homo sapiens
FFEFGGVMC

SEQ ID NO: 141906 - protein, 9 aa, Homo sapiens
FEFGGVMCV

SEQ ID NO: 141907 - protein, 9 aa, Homo sapiens
EFGGVMCVE

SEQ ID NO: 141908 - protein, 9 aa, Homo sapiens
FGGVMCVES

SEQ ID NO: 141909 - protein, 9 aa, Homo sapiens
GGVMCVESV

SEQ ID NO: 141910 - protein, 9 aa, Homo sapiens
GVMCVESVN

SEQ ID NO: 141911 - protein, 9 aa, Homo sapiens
VMCVESVNR

SEQ ID NO: 141912 - protein, 9 aa, Homo sapiens
MCVESVNRE

SEQ ID NO: 141913 - protein, 9 aa, Homo sapiens
CVESVNREM

SEQ ID NO: 141914 - protein, 9 aa, Homo sapiens
VESVNREMS

SEQ ID NO: 141915 - protein, 9 aa, Homo sapiens
ESVNREMSP

SEQ ID NO: 141916 - protein, 9 aa, Homo sapiens
SVNREMSPL

SEQ ID NO: 141917 - protein, 9 aa, Homo sapiens
VNREMSPLV

SEQ ID NO: 141918 - protein, 9 aa, Homo sapiens
NREMSPLVD

SEQ ID NO: 141919 - protein, 9 aa, Homo sapiens
REMSPLVDN

SEQ ID NO: 141920 - protein, 9 aa, Homo sapiens
EMSPLVDNI

SEQ ID NO: 141921 - protein, 9 aa, Homo sapiens
MSPLVDNIA

SEQ ID NO: 141922 - protein, 9 aa, Homo sapiens
SPLVDNIAL

SEQ ID NO: 141923 - protein, 9 aa, Homo sapiens
PLVDNIALW

SEQ ID NO: 141924 - protein, 9 aa, Homo sapiens
LVDNIALWM

SEQ ID NO: 141925 - protein, 9 aa, Homo sapiens
VDNIALWMT

SEQ ID NO: 141926 - protein, 9 aa, Homo sapiens
DNIALWMTE

SEQ ID NO: 141927 - protein, 9 aa, Homo sapiens
NIALWMTEY

SEQ ID NO: 141928 - protein, 9 aa, Homo sapiens
IALWMTEYL

SEQ ID NO: 141929 - protein, 9 aa, Homo sapiens
ALWMTEYLN

SEQ ID NO: 141930 - protein, 9 aa, Homo sapiens
LWMTEYLNR

SEQ ID NO: 141931 - protein, 9 aa, Homo sapiens
WMTEYLNRH

SEQ ID NO: 141932 - protein, 9 aa, Homo sapiens
MTEYLNRHL

SEQ ID NO: 141933 - protein, 9 aa, Homo sapiens
TEYLNRHLH

SEQ ID NO: 141934 - protein, 9 aa, Homo sapiens
EYLNRHLHT

SEQ ID NO: 141935 - protein, 9 aa, Homo sapiens
YLNRHLHTW

SEQ ID NO: 141936 - protein, 9 aa, Homo sapiens
LNRHLHTWI

SEQ ID NO: 141937 - protein, 9 aa, Homo sapiens
NRHLHTWIQ

SEQ ID NO: 141938 - protein, 9 aa, Homo sapiens
RHLHTWIQD

SEQ ID NO: 141939 - protein, 9 aa, Homo sapiens
HLHTWIQDN

SEQ ID NO: 141940 - protein, 9 aa, Homo sapiens
LHTWIQDNG

SEQ ID NO: 141941 - protein, 9 aa, Homo sapiens
HTWIQDNGG

SEQ ID NO: 141942 - protein, 9 aa, Homo sapiens
TWIQDNGGW

SEQ ID NO: 141943 - protein, 9 aa, Homo sapiens
WIQDNGGWD

SEQ ID NO: 141944 - protein, 9 aa, Homo sapiens
IQDNGGWDA

SEQ ID NO: 141945 - protein, 9 aa, Homo sapiens
QDNGGWDAF

SEQ ID NO: 141946 - protein, 9 aa, Homo sapiens
DNGGWDAFV

SEQ ID NO: 141947 - protein, 9 aa, Homo sapiens
NGGWDAFVE

SEQ ID NO: 141948 - protein, 9 aa, Homo sapiens
GGWDAFVEL

SEQ ID NO: 141949 - protein, 9 aa, Homo sapiens
GWDAFVELY

SEQ ID NO: 141950 - protein, 9 aa, Homo sapiens
WDAFVELYG

SEQ ID NO: 141951 - protein, 9 aa, Homo sapiens
DAFVELYGP

SEQ ID NO: 141952 - protein, 9 aa, Homo sapiens
AFVELYGPS

SEQ ID NO: 141953 - protein, 9 aa, Homo sapiens
FVELYGPSM

SEQ ID NO: 141954 - protein, 9 aa, Homo sapiens
VELYGPSMR

SEQ ID NO: 141955 - protein, 9 aa, Homo sapiens
ELYGPSMRP

SEQ ID NO: 141956 - protein, 9 aa, Homo sapiens
LYGPSMRPL

SEQ ID NO: 141957 - protein, 9 aa, Homo sapiens
YGPSMRPLF

SEQ ID NO: 141958 - protein, 9 aa, Homo sapiens
GPSMRPLFD

SEQ ID NO: 141959 - protein, 9 aa, Homo sapiens
PSMRPLFDF

SEQ ID NO: 141960 - protein, 9 aa, Homo sapiens
SMRPLFDFS

SEQ ID NO: 141961 - protein, 9 aa, Homo sapiens
MRPLFDFSW

SEQ ID NO: 141962 - protein, 9 aa, Homo sapiens
RPLFDFSWL

SEQ ID NO: 141963 - protein, 9 aa, Homo sapiens
PLFDFSWLS

SEQ ID NO: 141964 - protein, 9 aa, Homo sapiens
LFDFSWLSL

SEQ ID NO: 141965 - protein, 9 aa, Homo sapiens
FDFSWLSLK

SEQ ID NO: 141966 - protein, 9 aa, Homo sapiens
DFSWLSLKT

SEQ ID NO: 141967 - protein, 9 aa, Homo sapiens
FSWLSLKTL

SEQ ID NO: 141968 - protein, 9 aa, Homo sapiens
SWLSLKTLL

SEQ ID NO: 141969 - protein, 9 aa, Homo sapiens
WLSLKTLLS

SEQ ID NO: 141970 - protein, 9 aa, Homo sapiens
LSLKTLLSL

SEQ ID NO: 141971 - protein, 9 aa, Homo sapiens
SLKTLLSLA

SEQ ID NO: 141972 - protein, 9 aa, Homo sapiens
LKTLLSLAL

SEQ ID NO: 141973 - protein, 9 aa, Homo sapiens
KTLLSLALV

SEQ ID NO: 141974 - protein, 9 aa, Homo sapiens
TLLSLALVG

SEQ ID NO: 141975 - protein, 9 aa, Homo sapiens
LLSLALVGA

SEQ ID NO: 141976 - protein, 9 aa, Homo sapiens
LSLALVGAC

SEQ ID NO: 141977 - protein, 9 aa, Homo sapiens
SLALVGACI

SEQ ID NO: 141978 - protein, 9 aa, Homo sapiens
LALVGACIT

SEQ ID NO: 141979 - protein, 9 aa, Homo sapiens
ALVGACITL

SEQ ID NO: 141980 - protein, 9 aa, Homo sapiens
LVGACITLG

SEQ ID NO: 141981 - protein, 9 aa, Homo sapiens
VGACITLGA

SEQ ID NO: 141982 - protein, 9 aa, Homo sapiens
GACITLGAY

SEQ ID NO: 141983 - protein, 9 aa, Homo sapiens
ACITLGAYL

SEQ ID NO: 141984 - protein, 9 aa, Homo sapiens
CITLGAYLG

SEQ ID NO: 141985 - protein, 9 aa, Homo sapiens
ITLGAYLGH

SEQ ID NO: 141986 - protein, 9 aa, Homo sapiens
TLGAYLGHK

SEQ ID NO: 141987 - protein, 8 aa, Homo sapiens
LGAYLGHK

SEQ ID NO: 141988 - protein, 7 aa, Homo sapiens
GAYLGHK

SEQ ID NO: 141989 - protein, 9 aa, Homo sapiens
MWNLLHETD

SEQ ID NO: 141990 - protein, 9 aa, Homo sapiens
WNLLHETDS

SEQ ID NO: 141991 - protein, 9 aa, Homo sapiens
NLLHETDSA

SEQ ID NO: 141992 - protein, 9 aa, Homo sapiens
LLHETDSAV

SEQ ID NO: 141993 - protein, 9 aa, Homo sapiens
LHETDSAVA

SEQ ID NO: 141994 - protein, 9 aa, Homo sapiens
HETDSAVAT

SEQ ID NO: 141995 - protein, 9 aa, Homo sapiens
ETDSAVATA

SEQ ID NO: 141996 - protein, 9 aa, Homo sapiens
TDSAVATAR

SEQ ID NO: 141997 - protein, 9 aa, Homo sapiens
DSAVATARR

SEQ ID NO: 141998 - protein, 9 aa, Homo sapiens
SAVATARRP

SEQ ID NO: 141999 - protein, 9 aa, Homo sapiens
AVATARRPR

SEQ ID NO: 142000 - protein, 9 aa, Homo sapiens
VATARRPRW

SEQ ID NO: 142001 - protein, 9 aa, Homo sapiens
ATARRPRWL

SEQ ID NO: 142002 - protein, 9 aa, Homo sapiens
TARRPRWLC

SEQ ID NO: 142003 - protein, 9 aa, Homo sapiens
ARRPRWLCA

SEQ ID NO: 142004 - protein, 9 aa, Homo sapiens
RRPRWLCAG

SEQ ID NO: 142005 - protein, 9 aa, Homo sapiens
RPRWLCAGA

SEQ ID NO: 142006 - protein, 9 aa, Homo sapiens
PRWLCAGAL

SEQ ID NO: 142007 - protein, 9 aa, Homo sapiens
RWLCAGALV

SEQ ID NO: 142008 - protein, 9 aa, Homo sapiens
WLCAGALVL

SEQ ID NO: 142009 - protein, 9 aa, Homo sapiens
LCAGALVLA

SEQ ID NO: 142010 - protein, 9 aa, Homo sapiens
CAGALVLAG

SEQ ID NO: 142011 - protein, 9 aa, Homo sapiens
AGALVLAGG

SEQ ID NO: 142012 - protein, 9 aa, Homo sapiens
GALVLAGGF

SEQ ID NO: 142013 - protein, 9 aa, Homo sapiens
ALVLAGGFF

SEQ ID NO: 142014 - protein, 9 aa, Homo sapiens
LVLAGGFFL

SEQ ID NO: 142015 - protein, 9 aa, Homo sapiens
VLAGGFFLL

SEQ ID NO: 142016 - protein, 9 aa, Homo sapiens
LAGGFFLLG

SEQ ID NO: 142017 - protein, 9 aa, Homo sapiens
AGGFFLLGF

SEQ ID NO: 142018 - protein, 9 aa, Homo sapiens
GGFFLLGFL

SEQ ID NO: 142019 - protein, 9 aa, Homo sapiens
GFFLLGFLF

SEQ ID NO: 142020 - protein, 9 aa, Homo sapiens
FFLLGFLFG

SEQ ID NO: 142021 - protein, 9 aa, Homo sapiens
FLLGFLFGW

SEQ ID NO: 142022 - protein, 9 aa, Homo sapiens
LLGFLFGWF

SEQ ID NO: 142023 - protein, 9 aa, Homo sapiens
LGFLFGWFI

SEQ ID NO: 142024 - protein, 9 aa, Homo sapiens
GFLFGWFIK

SEQ ID NO: 142025 - protein, 9 aa, Homo sapiens
FLFGWFIKS

SEQ ID NO: 142026 - protein, 9 aa, Homo sapiens
LFGWFIKSS

SEQ ID NO: 142027 - protein, 9 aa, Homo sapiens
FGWFIKSSN

SEQ ID NO: 142028 - protein, 9 aa, Homo sapiens
GWFIKSSNE

SEQ ID NO: 142029 - protein, 9 aa, Homo sapiens
WFIKSSNEA

SEQ ID NO: 142030 - protein, 9 aa, Homo sapiens
FIKSSNEAT

SEQ ID NO: 142031 - protein, 9 aa, Homo sapiens
IKSSNEATN

SEQ ID NO: 142032 - protein, 9 aa, Homo sapiens
KSSNEATNI

SEQ ID NO: 142033 - protein, 9 aa, Homo sapiens
SSNEATNIT

SEQ ID NO: 142034 - protein, 9 aa, Homo sapiens
SNEATNITP

SEQ ID NO: 142035 - protein, 9 aa, Homo sapiens
NEATNITPK

SEQ ID NO: 142036 - protein, 9 aa, Homo sapiens
EATNITPKH

SEQ ID NO: 142037 - protein, 9 aa, Homo sapiens
ATNITPKHN

SEQ ID NO: 142038 - protein, 9 aa, Homo sapiens
TNITPKHNM

SEQ ID NO: 142039 - protein, 9 aa, Homo sapiens
NITPKHNMK

SEQ ID NO: 142040 - protein, 9 aa, Homo sapiens
ITPKHNMKA

SEQ ID NO: 142041 - protein, 9 aa, Homo sapiens
TPKHNMKAF

SEQ ID NO: 142042 - protein, 9 aa, Homo sapiens
PKHNMKAFL

SEQ ID NO: 142043 - protein, 9 aa, Homo sapiens
KHNMKAFLD

SEQ ID NO: 142044 - protein, 9 aa, Homo sapiens
HNMKAFLDE

SEQ ID NO: 142045 - protein, 9 aa, Homo sapiens
NMKAFLDEL

SEQ ID NO: 142046 - protein, 9 aa, Homo sapiens
MKAFLDELK

SEQ ID NO: 142047 - protein, 9 aa, Homo sapiens
KAFLDELKA

SEQ ID NO: 142048 - protein, 9 aa, Homo sapiens
AFLDELKAE

SEQ ID NO: 142049 - protein, 9 aa, Homo sapiens
FLDELKAEN

SEQ ID NO: 142050 - protein, 9 aa, Homo sapiens
LDELKAENI

SEQ ID NO: 142051 - protein, 9 aa, Homo sapiens
DELKAENIK

SEQ ID NO: 142052 - protein, 9 aa, Homo sapiens
ELKAENIKK

SEQ ID NO: 142053 - protein, 9 aa, Homo sapiens
LKAENIKKF

SEQ ID NO: 142054 - protein, 9 aa, Homo sapiens
KAENIKKFL

SEQ ID NO: 142055 - protein, 9 aa, Homo sapiens
AENIKKFLY

SEQ ID NO: 142056 - protein, 9 aa, Homo sapiens
ENIKKFLYN

SEQ ID NO: 142057 - protein, 9 aa, Homo sapiens
NIKKFLYNF

SEQ ID NO: 142058 - protein, 9 aa, Homo sapiens
IKKFLYNFT

SEQ ID NO: 142059 - protein, 9 aa, Homo sapiens
KKFLYNFTQ

SEQ ID NO: 142060 - protein, 9 aa, Homo sapiens
KFLYNFTQI

SEQ ID NO: 142061 - protein, 9 aa, Homo sapiens
FLYNFTQIP

SEQ ID NO: 142062 - protein, 9 aa, Homo sapiens
LYNFTQIPH

SEQ ID NO: 142063 - protein, 9 aa, Homo sapiens
YNFTQIPHL

SEQ ID NO: 142064 - protein, 9 aa, Homo sapiens
NFTQIPHLA

SEQ ID NO: 142065 - protein, 9 aa, Homo sapiens
FTQIPHLAG

SEQ ID NO: 142066 - protein, 9 aa, Homo sapiens
TQIPHLAGT

SEQ ID NO: 142067 - protein, 9 aa, Homo sapiens
QIPHLAGTE

SEQ ID NO: 142068 - protein, 9 aa, Homo sapiens
IPHLAGTEQ

SEQ ID NO: 142069 - protein, 9 aa, Homo sapiens
PHLAGTEQN

SEQ ID NO: 142070 - protein, 9 aa, Homo sapiens
HLAGTEQNF

SEQ ID NO: 142071 - protein, 9 aa, Homo sapiens
LAGTEQNFQ

SEQ ID NO: 142072 - protein, 9 aa, Homo sapiens
AGTEQNFQL

SEQ ID NO: 142073 - protein, 9 aa, Homo sapiens
GTEQNFQLA

SEQ ID NO: 142074 - protein, 9 aa, Homo sapiens
TEQNFQLAK

SEQ ID NO: 142075 - protein, 9 aa, Homo sapiens
EQNFQLAKQ

SEQ ID NO: 142076 - protein, 9 aa, Homo sapiens
QNFQLAKQI

SEQ ID NO: 142077 - protein, 9 aa, Homo sapiens
NFQLAKQIQ

SEQ ID NO: 142078 - protein, 9 aa, Homo sapiens
FQLAKQIQS

SEQ ID NO: 142079 - protein, 9 aa, Homo sapiens
QLAKQIQSQ

SEQ ID NO: 142080 - protein, 9 aa, Homo sapiens
LAKQIQSQW

SEQ ID NO: 142081 - protein, 9 aa, Homo sapiens
AKQIQSQWK

SEQ ID NO: 142082 - protein, 9 aa, Homo sapiens
KQIQSQWKE

SEQ ID NO: 142083 - protein, 9 aa, Homo sapiens
QIQSQWKEF

SEQ ID NO: 142084 - protein, 9 aa, Homo sapiens
IQSQWKEFG

SEQ ID NO: 142085 - protein, 9 aa, Homo sapiens
QSQWKEFGL

SEQ ID NO: 142086 - protein, 9 aa, Homo sapiens
SQWKEFGLD

SEQ ID NO: 142087 - protein, 9 aa, Homo sapiens
QWKEFGLDS

SEQ ID NO: 142088 - protein, 9 aa, Homo sapiens
WKEFGLDSV

SEQ ID NO: 142089 - protein, 9 aa, Homo sapiens
KEFGLDSVE

SEQ ID NO: 142090 - protein, 9 aa, Homo sapiens
EFGLDSVEL

SEQ ID NO: 142091 - protein, 9 aa, Homo sapiens
FGLDSVELA

SEQ ID NO: 142092 - protein, 9 aa, Homo sapiens
GLDSVELAH

SEQ ID NO: 142093 - protein, 9 aa, Homo sapiens
LDSVELAHY

SEQ ID NO: 142094 - protein, 9 aa, Homo sapiens
DSVELAHYD

SEQ ID NO: 142095 - protein, 9 aa, Homo sapiens
SVELAHYDV

SEQ ID NO: 142096 - protein, 9 aa, Homo sapiens
VELAHYDVL

SEQ ID NO: 142097 - protein, 9 aa, Homo sapiens
ELAHYDVLL

SEQ ID NO: 142098 - protein, 9 aa, Homo sapiens
LAHYDVLLS

SEQ ID NO: 142099 - protein, 9 aa, Homo sapiens
AHYDVLLSY

SEQ ID NO: 142100 - protein, 9 aa, Homo sapiens
HYDVLLSYP

SEQ ID NO: 142101 - protein, 9 aa, Homo sapiens
YDVLLSYPN

SEQ ID NO: 142102 - protein, 9 aa, Homo sapiens
DVLLSYPNK

SEQ ID NO: 142103 - protein, 9 aa, Homo sapiens
VLLSYPNKT

SEQ ID NO: 142104 - protein, 9 aa, Homo sapiens
LLSYPNKTH

SEQ ID NO: 142105 - protein, 9 aa, Homo sapiens
LSYPNKTHP

SEQ ID NO: 142106 - protein, 9 aa, Homo sapiens
SYPNKTHPN

SEQ ID NO: 142107 - protein, 9 aa, Homo sapiens
YPNKTHPNY

SEQ ID NO: 142108 - protein, 9 aa, Homo sapiens
PNKTHPNYI

SEQ ID NO: 142109 - protein, 9 aa, Homo sapiens
NKTHPNYIS

SEQ ID NO: 142110 - protein, 9 aa, Homo sapiens
KTHPNYISI

SEQ ID NO: 142111 - protein, 9 aa, Homo sapiens
THPNYISII

SEQ ID NO: 142112 - protein, 9 aa, Homo sapiens
HPNYISIIN

SEQ ID NO: 142113 - protein, 9 aa, Homo sapiens
PNYISIINE

SEQ ID NO: 142114 - protein, 9 aa, Homo sapiens
NYISIINED

SEQ ID NO: 142115 - protein, 9 aa, Homo sapiens
YISIINEDG

SEQ ID NO: 142116 - protein, 9 aa, Homo sapiens
ISIINEDGN

SEQ ID NO: 142117 - protein, 9 aa, Homo sapiens
SIINEDGNE

SEQ ID NO: 142118 - protein, 9 aa, Homo sapiens
IINEDGNEI

SEQ ID NO: 142119 - protein, 9 aa, Homo sapiens
INEDGNEIF

SEQ ID NO: 142120 - protein, 9 aa, Homo sapiens
NEDGNEIFN

SEQ ID NO: 142121 - protein, 9 aa, Homo sapiens
EDGNEIFNT

SEQ ID NO: 142122 - protein, 9 aa, Homo sapiens
DGNEIFNTS

SEQ ID NO: 142123 - protein, 9 aa, Homo sapiens
GNEIFNTSL

SEQ ID NO: 142124 - protein, 9 aa, Homo sapiens
NEIFNTSLF

SEQ ID NO: 142125 - protein, 9 aa, Homo sapiens
EIFNTSLFE

SEQ ID NO: 142126 - protein, 9 aa, Homo sapiens
IFNTSLFEP

SEQ ID NO: 142127 - protein, 9 aa, Homo sapiens
FNTSLFEPP

SEQ ID NO: 142128 - protein, 9 aa, Homo sapiens
NTSLFEPPP

SEQ ID NO: 142129 - protein, 9 aa, Homo sapiens
TSLFEPPPP

SEQ ID NO: 142130 - protein, 9 aa, Homo sapiens
SLFEPPPPG

SEQ ID NO: 142131 - protein, 9 aa, Homo sapiens
LFEPPPPGY

SEQ ID NO: 142132 - protein, 9 aa, Homo sapiens
FEPPPPGYE

SEQ ID NO: 142133 - protein, 9 aa, Homo sapiens
EPPPPGYEN

SEQ ID NO: 142134 - protein, 9 aa, Homo sapiens
PPPPGYENV

SEQ ID NO: 142135 - protein, 9 aa, Homo sapiens
PPPGYENVS

SEQ ID NO: 142136 - protein, 9 aa, Homo sapiens
PPGYENVSD

SEQ ID NO: 142137 - protein, 9 aa, Homo sapiens
PGYENVSDI

SEQ ID NO: 142138 - protein, 9 aa, Homo sapiens
GYENVSDIV

SEQ ID NO: 142139 - protein, 9 aa, Homo sapiens
YENVSDIVP

SEQ ID NO: 142140 - protein, 9 aa, Homo sapiens
ENVSDIVPP

SEQ ID NO: 142141 - protein, 9 aa, Homo sapiens
NVSDIVPPF

SEQ ID NO: 142142 - protein, 9 aa, Homo sapiens
VSDIVPPFS

SEQ ID NO: 142143 - protein, 9 aa, Homo sapiens
SDIVPPFSA

SEQ ID NO: 142144 - protein, 9 aa, Homo sapiens
DIVPPFSAF

SEQ ID NO: 142145 - protein, 9 aa, Homo sapiens
IVPPFSAFS

SEQ ID NO: 142146 - protein, 9 aa, Homo sapiens
VPPFSAFSP

SEQ ID NO: 142147 - protein, 9 aa, Homo sapiens
PPFSAFSPQ

SEQ ID NO: 142148 - protein, 9 aa, Homo sapiens
PFSAFSPQG

SEQ ID NO: 142149 - protein, 9 aa, Homo sapiens
FSAFSPQGM

SEQ ID NO: 142150 - protein, 9 aa, Homo sapiens
SAFSPQGMP

SEQ ID NO: 142151 - protein, 9 aa, Homo sapiens
AFSPQGMPE

SEQ ID NO: 142152 - protein, 9 aa, Homo sapiens
FSPQGMPEG

SEQ ID NO: 142153 - protein, 9 aa, Homo sapiens
SPQGMPEGD

SEQ ID NO: 142154 - protein, 9 aa, Homo sapiens
PQGMPEGDL

SEQ ID NO: 142155 - protein, 9 aa, Homo sapiens
QGMPEGDLV

SEQ ID NO: 142156 - protein, 9 aa, Homo sapiens
GMPEGDLVY

SEQ ID NO: 142157 - protein, 9 aa, Homo sapiens
MPEGDLVYV

SEQ ID NO: 142158 - protein, 9 aa, Homo sapiens
PEGDLVYVN

SEQ ID NO: 142159 - protein, 9 aa, Homo sapiens
EGDLVYVNY

SEQ ID NO: 142160 - protein, 9 aa, Homo sapiens
GDLVYVNYA

SEQ ID NO: 142161 - protein, 9 aa, Homo sapiens
DLVYVNYAR

SEQ ID NO: 142162 - protein, 9 aa, Homo sapiens
LVYVNYART

SEQ ID NO: 142163 - protein, 9 aa, Homo sapiens
VYVNYARTE

SEQ ID NO: 142164 - protein, 9 aa, Homo sapiens
YVNYARTED

SEQ ID NO: 142165 - protein, 9 aa, Homo sapiens
VNYARTEDF

SEQ ID NO: 142166 - protein, 9 aa, Homo sapiens
NYARTEDFF

SEQ ID NO: 142167 - protein, 9 aa, Homo sapiens
YARTEDFFK

SEQ ID NO: 142168 - protein, 9 aa, Homo sapiens
ARTEDFFKL

SEQ ID NO: 142169 - protein, 9 aa, Homo sapiens
RTEDFFKLE

SEQ ID NO: 142170 - protein, 9 aa, Homo sapiens
TEDFFKLER

SEQ ID NO: 142171 - protein, 9 aa, Homo sapiens
EDFFKLERD

SEQ ID NO: 142172 - protein, 9 aa, Homo sapiens
DFFKLERDM

SEQ ID NO: 142173 - protein, 9 aa, Homo sapiens
FFKLERDMK

SEQ ID NO: 142174 - protein, 9 aa, Homo sapiens
FKLERDMKI

SEQ ID NO: 142175 - protein, 9 aa, Homo sapiens
KLERDMKIN

SEQ ID NO: 142176 - protein, 9 aa, Homo sapiens
LERDMKINC

SEQ ID NO: 142177 - protein, 9 aa, Homo sapiens
ERDMKINCS

SEQ ID NO: 142178 - protein, 9 aa, Homo sapiens
RDMKINCSG

SEQ ID NO: 142179 - protein, 9 aa, Homo sapiens
DMKINCSGK

SEQ ID NO: 142180 - protein, 9 aa, Homo sapiens
MKINCSGKI

SEQ ID NO: 142181 - protein, 9 aa, Homo sapiens
KINCSGKIV

SEQ ID NO: 142182 - protein, 9 aa, Homo sapiens
INCSGKIVI

SEQ ID NO: 142183 - protein, 9 aa, Homo sapiens
NCSGKIVIA

SEQ ID NO: 142184 - protein, 9 aa, Homo sapiens
CSGKIVIAR

SEQ ID NO: 142185 - protein, 9 aa, Homo sapiens
SGKIVIARY

SEQ ID NO: 142186 - protein, 9 aa, Homo sapiens
GKIVIARYG

SEQ ID NO: 142187 - protein, 9 aa, Homo sapiens
KIVIARYGK

SEQ ID NO: 142188 - protein, 9 aa, Homo sapiens
IVIARYGKV

SEQ ID NO: 142189 - protein, 9 aa, Homo sapiens
VIARYGKVF

SEQ ID NO: 142190 - protein, 9 aa, Homo sapiens
IARYGKVFR

SEQ ID NO: 142191 - protein, 9 aa, Homo sapiens
ARYGKVFRG

SEQ ID NO: 142192 - protein, 9 aa, Homo sapiens
RYGKVFRGN

SEQ ID NO: 142193 - protein, 9 aa, Homo sapiens
YGKVFRGNK

SEQ ID NO: 142194 - protein, 9 aa, Homo sapiens
GKVFRGNKV

SEQ ID NO: 142195 - protein, 9 aa, Homo sapiens
KVFRGNKVK

SEQ ID NO: 142196 - protein, 9 aa, Homo sapiens
VFRGNKVKN

SEQ ID NO: 142197 - protein, 9 aa, Homo sapiens
FRGNKVKNA

SEQ ID NO: 142198 - protein, 9 aa, Homo sapiens
RGNKVKNAQ

SEQ ID NO: 142199 - protein, 9 aa, Homo sapiens
GNKVKNAQL

SEQ ID NO: 142200 - protein, 9 aa, Homo sapiens
NKVKNAQLA

SEQ ID NO: 142201 - protein, 9 aa, Homo sapiens
KVKNAQLAG

SEQ ID NO: 142202 - protein, 9 aa, Homo sapiens
VKNAQLAGA

SEQ ID NO: 142203 - protein, 9 aa, Homo sapiens
KNAQLAGAK

SEQ ID NO: 142204 - protein, 9 aa, Homo sapiens
NAQLAGAKG

SEQ ID NO: 142205 - protein, 9 aa, Homo sapiens
AQLAGAKGV

SEQ ID NO: 142206 - protein, 9 aa, Homo sapiens
QLAGAKGVI

SEQ ID NO: 142207 - protein, 9 aa, Homo sapiens
LAGAKGVIL

SEQ ID NO: 142208 - protein, 9 aa, Homo sapiens
AGAKGVILY

SEQ ID NO: 142209 - protein, 9 aa, Homo sapiens
GAKGVILYS

SEQ ID NO: 142210 - protein, 9 aa, Homo sapiens
AKGVILYSD

SEQ ID NO: 142211 - protein, 9 aa, Homo sapiens
KGVILYSDP

SEQ ID NO: 142212 - protein, 9 aa, Homo sapiens
GVILYSDPA

SEQ ID NO: 142213 - protein, 9 aa, Homo sapiens
VILYSDPAD

SEQ ID NO: 142214 - protein, 9 aa, Homo sapiens
ILYSDPADY

SEQ ID NO: 142215 - protein, 9 aa, Homo sapiens
LYSDPADYF

SEQ ID NO: 142216 - protein, 9 aa, Homo sapiens
YSDPADYFA

SEQ ID NO: 142217 - protein, 9 aa, Homo sapiens
SDPADYFAP

SEQ ID NO: 142218 - protein, 9 aa, Homo sapiens
DPADYFAPG

SEQ ID NO: 142219 - protein, 9 aa, Homo sapiens
PADYFAPGV

SEQ ID NO: 142220 - protein, 9 aa, Homo sapiens
ADYFAPGVK

SEQ ID NO: 142221 - protein, 9 aa, Homo sapiens
DYFAPGVKS

SEQ ID NO: 142222 - protein, 9 aa, Homo sapiens
YFAPGVKSY

SEQ ID NO: 142223 - protein, 9 aa, Homo sapiens
FAPGVKSYP

SEQ ID NO: 142224 - protein, 9 aa, Homo sapiens
APGVKSYPD

SEQ ID NO: 142225 - protein, 9 aa, Homo sapiens
PGVKSYPDG

SEQ ID NO: 142226 - protein, 9 aa, Homo sapiens
GVKSYPDGW

SEQ ID NO: 142227 - protein, 9 aa, Homo sapiens
VKSYPDGWN

SEQ ID NO: 142228 - protein, 9 aa, Homo sapiens
KSYPDGWNL

SEQ ID NO: 142229 - protein, 9 aa, Homo sapiens
SYPDGWNLP

SEQ ID NO: 142230 - protein, 9 aa, Homo sapiens
YPDGWNLPG

SEQ ID NO: 142231 - protein, 9 aa, Homo sapiens
PDGWNLPGG

SEQ ID NO: 142232 - protein, 9 aa, Homo sapiens
DGWNLPGGG

SEQ ID NO: 142233 - protein, 9 aa, Homo sapiens
GWNLPGGGV

SEQ ID NO: 142234 - protein, 9 aa, Homo sapiens
WNLPGGGVQ

SEQ ID NO: 142235 - protein, 9 aa, Homo sapiens
NLPGGGVQR

SEQ ID NO: 142236 - protein, 9 aa, Homo sapiens
LPGGGVQRG

SEQ ID NO: 142237 - protein, 9 aa, Homo sapiens
PGGGVQRGN

SEQ ID NO: 142238 - protein, 9 aa, Homo sapiens
GGGVQRGNI

SEQ ID NO: 142239 - protein, 9 aa, Homo sapiens
GGVQRGNIL

SEQ ID NO: 142240 - protein, 9 aa, Homo sapiens
GVQRGNILN

SEQ ID NO: 142241 - protein, 9 aa, Homo sapiens
VQRGNILNL

SEQ ID NO: 142242 - protein, 9 aa, Homo sapiens
QRGNILNLN

SEQ ID NO: 142243 - protein, 9 aa, Homo sapiens
RGNILNLNG

SEQ ID NO: 142244 - protein, 9 aa, Homo sapiens
GNILNLNGA

SEQ ID NO: 142245 - protein, 9 aa, Homo sapiens
NILNLNGAG

SEQ ID NO: 142246 - protein, 9 aa, Homo sapiens
ILNLNGAGD

SEQ ID NO: 142247 - protein, 9 aa, Homo sapiens
LNLNGAGDP

SEQ ID NO: 142248 - protein, 9 aa, Homo sapiens
NLNGAGDPL

SEQ ID NO: 142249 - protein, 9 aa, Homo sapiens
LNGAGDPLT

SEQ ID NO: 142250 - protein, 9 aa, Homo sapiens
NGAGDPLTP

SEQ ID NO: 142251 - protein, 9 aa, Homo sapiens
GAGDPLTPG

SEQ ID NO: 142252 - protein, 9 aa, Homo sapiens
AGDPLTPGY

SEQ ID NO: 142253 - protein, 9 aa, Homo sapiens
GDPLTPGYP

SEQ ID NO: 142254 - protein, 9 aa, Homo sapiens
DPLTPGYPA

SEQ ID NO: 142255 - protein, 9 aa, Homo sapiens
PLTPGYPAN

SEQ ID NO: 142256 - protein, 9 aa, Homo sapiens
LTPGYPANE

SEQ ID NO: 142257 - protein, 9 aa, Homo sapiens
TPGYPANEY

SEQ ID NO: 142258 - protein, 9 aa, Homo sapiens
PGYPANEYA

SEQ ID NO: 142259 - protein, 9 aa, Homo sapiens
GYPANEYAY

SEQ ID NO: 142260 - protein, 9 aa, Homo sapiens
YPANEYAYR

SEQ ID NO: 142261 - protein, 9 aa, Homo sapiens
PANEYAYRR

SEQ ID NO: 142262 - protein, 9 aa, Homo sapiens
ANEYAYRRG

SEQ ID NO: 142263 - protein, 9 aa, Homo sapiens
NEYAYRRGI

SEQ ID NO: 142264 - protein, 9 aa, Homo sapiens
EYAYRRGIA

SEQ ID NO: 142265 - protein, 9 aa, Homo sapiens
YAYRRGIAE

SEQ ID NO: 142266 - protein, 9 aa, Homo sapiens
AYRRGIAEA

SEQ ID NO: 142267 - protein, 9 aa, Homo sapiens
YRRGIAEAV

SEQ ID NO: 142268 - protein, 9 aa, Homo sapiens
RRGIAEAVG

SEQ ID NO: 142269 - protein, 9 aa, Homo sapiens
RGIAEAVGL

SEQ ID NO: 142270 - protein, 9 aa, Homo sapiens
GIAEAVGLP

SEQ ID NO: 142271 - protein, 9 aa, Homo sapiens
IAEAVGLPS

SEQ ID NO: 142272 - protein, 9 aa, Homo sapiens
AEAVGLPSI

SEQ ID NO: 142273 - protein, 9 aa, Homo sapiens
EAVGLPSIP

SEQ ID NO: 142274 - protein, 9 aa, Homo sapiens
AVGLPSIPV

SEQ ID NO: 142275 - protein, 9 aa, Homo sapiens
VGLPSIPVH

SEQ ID NO: 142276 - protein, 9 aa, Homo sapiens
GLPSIPVHP

SEQ ID NO: 142277 - protein, 9 aa, Homo sapiens
LPSIPVHPI

SEQ ID NO: 142278 - protein, 9 aa, Homo sapiens
PSIPVHPIG

SEQ ID NO: 142279 - protein, 9 aa, Homo sapiens
SIPVHPIGY

SEQ ID NO: 142280 - protein, 9 aa, Homo sapiens
IPVHPIGYY

SEQ ID NO: 142281 - protein, 9 aa, Homo sapiens
PVHPIGYYD

SEQ ID NO: 142282 - protein, 9 aa, Homo sapiens
VHPIGYYDA

SEQ ID NO: 142283 - protein, 9 aa, Homo sapiens
HPIGYYDAQ

SEQ ID NO: 142284 - protein, 9 aa, Homo sapiens
PIGYYDAQK

SEQ ID NO: 142285 - protein, 9 aa, Homo sapiens
IGYYDAQKL

SEQ ID NO: 142286 - protein, 9 aa, Homo sapiens
GYYDAQKLL

SEQ ID NO: 142287 - protein, 9 aa, Homo sapiens
YYDAQKLLE

SEQ ID NO: 142288 - protein, 9 aa, Homo sapiens
YDAQKLLEK

SEQ ID NO: 142289 - protein, 9 aa, Homo sapiens
DAQKLLEKM

SEQ ID NO: 142290 - protein, 9 aa, Homo sapiens
AQKLLEKMG

SEQ ID NO: 142291 - protein, 9 aa, Homo sapiens
QKLLEKMGG

SEQ ID NO: 142292 - protein, 9 aa, Homo sapiens
KLLEKMGGS

SEQ ID NO: 142293 - protein, 9 aa, Homo sapiens
LLEKMGGSA

SEQ ID NO: 142294 - protein, 9 aa, Homo sapiens
LEKMGGSAP

SEQ ID NO: 142295 - protein, 9 aa, Homo sapiens
EKMGGSAPP

SEQ ID NO: 142296 - protein, 9 aa, Homo sapiens
KMGGSAPPD

SEQ ID NO: 142297 - protein, 9 aa, Homo sapiens
MGGSAPPDS

SEQ ID NO: 142298 - protein, 9 aa, Homo sapiens
GGSAPPDSS

SEQ ID NO: 142299 - protein, 9 aa, Homo sapiens
GSAPPDSSW

SEQ ID NO: 142300 - protein, 9 aa, Homo sapiens
SAPPDSSWR

SEQ ID NO: 142301 - protein, 9 aa, Homo sapiens
APPDSSWRG

SEQ ID NO: 142302 - protein, 9 aa, Homo sapiens
PPDSSWRGS

SEQ ID NO: 142303 - protein, 9 aa, Homo sapiens
PDSSWRGSL

SEQ ID NO: 142304 - protein, 9 aa, Homo sapiens
DSSWRGSLK

SEQ ID NO: 142305 - protein, 9 aa, Homo sapiens
SSWRGSLKV

SEQ ID NO: 142306 - protein, 9 aa, Homo sapiens
SWRGSLKVP

SEQ ID NO: 142307 - protein, 9 aa, Homo sapiens
WRGSLKVPY

SEQ ID NO: 142308 - protein, 9 aa, Homo sapiens
RGSLKVPYN

SEQ ID NO: 142309 - protein, 9 aa, Homo sapiens
GSLKVPYNV

SEQ ID NO: 142310 - protein, 9 aa, Homo sapiens
SLKVPYNVG

SEQ ID NO: 142311 - protein, 9 aa, Homo sapiens
LKVPYNVGP

SEQ ID NO: 142312 - protein, 9 aa, Homo sapiens
KVPYNVGPG

SEQ ID NO: 142313 - protein, 9 aa, Homo sapiens
VPYNVGPGF

SEQ ID NO: 142314 - protein, 9 aa, Homo sapiens
PYNVGPGFT

SEQ ID NO: 142315 - protein, 9 aa, Homo sapiens
YNVGPGFTG

SEQ ID NO: 142316 - protein, 9 aa, Homo sapiens
NVGPGFTGN

SEQ ID NO: 142317 - protein, 9 aa, Homo sapiens
VGPGFTGNF

SEQ ID NO: 142318 - protein, 9 aa, Homo sapiens
GPGFTGNFS

SEQ ID NO: 142319 - protein, 9 aa, Homo sapiens
PGFTGNFST

SEQ ID NO: 142320 - protein, 9 aa, Homo sapiens
GFTGNFSTQ

SEQ ID NO: 142321 - protein, 9 aa, Homo sapiens
FTGNFSTQK

SEQ ID NO: 142322 - protein, 9 aa, Homo sapiens
TGNFSTQKV

SEQ ID NO: 142323 - protein, 9 aa, Homo sapiens
GNFSTQKVK

SEQ ID NO: 142324 - protein, 9 aa, Homo sapiens
NFSTQKVKM

SEQ ID NO: 142325 - protein, 9 aa, Homo sapiens
FSTQKVKMH

SEQ ID NO: 142326 - protein, 9 aa, Homo sapiens
STQKVKMHI

SEQ ID NO: 142327 - protein, 9 aa, Homo sapiens
TQKVKMHIH

SEQ ID NO: 142328 - protein, 9 aa, Homo sapiens
QKVKMHIHS

SEQ ID NO: 142329 - protein, 9 aa, Homo sapiens
KVKMHIHST

SEQ ID NO: 142330 - protein, 9 aa, Homo sapiens
VKMHIHSTN

SEQ ID NO: 142331 - protein, 9 aa, Homo sapiens
KMHIHSTNE

SEQ ID NO: 142332 - protein, 9 aa, Homo sapiens
MHIHSTNEV

SEQ ID NO: 142333 - protein, 9 aa, Homo sapiens
HIHSTNEVT

SEQ ID NO: 142334 - protein, 9 aa, Homo sapiens
IHSTNEVTR

SEQ ID NO: 142335 - protein, 9 aa, Homo sapiens
HSTNEVTRI

SEQ ID NO: 142336 - protein, 9 aa, Homo sapiens
STNEVTRIY

SEQ ID NO: 142337 - protein, 9 aa, Homo sapiens
TNEVTRIYN

SEQ ID NO: 142338 - protein, 9 aa, Homo sapiens
NEVTRIYNV

SEQ ID NO: 142339 - protein, 9 aa, Homo sapiens
EVTRIYNVI

SEQ ID NO: 142340 - protein, 9 aa, Homo sapiens
VTRIYNVIG

SEQ ID NO: 142341 - protein, 9 aa, Homo sapiens
TRIYNVIGT

SEQ ID NO: 142342 - protein, 9 aa, Homo sapiens
RIYNVIGTL

SEQ ID NO: 142343 - protein, 9 aa, Homo sapiens
IYNVIGTLR

SEQ ID NO: 142344 - protein, 9 aa, Homo sapiens
YNVIGTLRG

SEQ ID NO: 142345 - protein, 9 aa, Homo sapiens
NVIGTLRGA

SEQ ID NO: 142346 - protein, 9 aa, Homo sapiens
VIGTLRGAV

SEQ ID NO: 142347 - protein, 9 aa, Homo sapiens
IGTLRGAVE

SEQ ID NO: 142348 - protein, 9 aa, Homo sapiens
GTLRGAVEP

SEQ ID NO: 142349 - protein, 9 aa, Homo sapiens
TLRGAVEPD

SEQ ID NO: 142350 - protein, 9 aa, Homo sapiens
LRGAVEPDR

SEQ ID NO: 142351 - protein, 9 aa, Homo sapiens
RGAVEPDRY

SEQ ID NO: 142352 - protein, 9 aa, Homo sapiens
GAVEPDRYV

SEQ ID NO: 142353 - protein, 9 aa, Homo sapiens
AVEPDRYVI

SEQ ID NO: 142354 - protein, 9 aa, Homo sapiens
VEPDRYVIL

SEQ ID NO: 142355 - protein, 9 aa, Homo sapiens
EPDRYVILG

SEQ ID NO: 142356 - protein, 9 aa, Homo sapiens
PDRYVILGG

SEQ ID NO: 142357 - protein, 9 aa, Homo sapiens
DRYVILGGH

SEQ ID NO: 142358 - protein, 9 aa, Homo sapiens
RYVILGGHR

SEQ ID NO: 142359 - protein, 9 aa, Homo sapiens
YVILGGHRD

SEQ ID NO: 142360 - protein, 9 aa, Homo sapiens
VILGGHRDS

SEQ ID NO: 142361 - protein, 9 aa, Homo sapiens
ILGGHRDSW

SEQ ID NO: 142362 - protein, 9 aa, Homo sapiens
LGGHRDSWV

SEQ ID NO: 142363 - protein, 9 aa, Homo sapiens
GGHRDSWVF

SEQ ID NO: 142364 - protein, 9 aa, Homo sapiens
GHRDSWVFG

SEQ ID NO: 142365 - protein, 9 aa, Homo sapiens
HRDSWVFGG

SEQ ID NO: 142366 - protein, 9 aa, Homo sapiens
RDSWVFGGI

SEQ ID NO: 142367 - protein, 9 aa, Homo sapiens
DSWVFGGID

SEQ ID NO: 142368 - protein, 9 aa, Homo sapiens
SWVFGGIDP

SEQ ID NO: 142369 - protein, 9 aa, Homo sapiens
WVFGGIDPQ

SEQ ID NO: 142370 - protein, 9 aa, Homo sapiens
VFGGIDPQS

SEQ ID NO: 142371 - protein, 9 aa, Homo sapiens
FGGIDPQSG

SEQ ID NO: 142372 - protein, 9 aa, Homo sapiens
GGIDPQSGA

SEQ ID NO: 142373 - protein, 9 aa, Homo sapiens
GIDPQSGAA

SEQ ID NO: 142374 - protein, 9 aa, Homo sapiens
IDPQSGAAV

SEQ ID NO: 142375 - protein, 9 aa, Homo sapiens
DPQSGAAVV

SEQ ID NO: 142376 - protein, 9 aa, Homo sapiens
PQSGAAVVH

SEQ ID NO: 142377 - protein, 9 aa, Homo sapiens
QSGAAVVHE

SEQ ID NO: 142378 - protein, 9 aa, Homo sapiens
SGAAVVHEI

SEQ ID NO: 142379 - protein, 9 aa, Homo sapiens
GAAVVHEIV

SEQ ID NO: 142380 - protein, 9 aa, Homo sapiens
AAVVHEIVR

SEQ ID NO: 142381 - protein, 9 aa, Homo sapiens
AVVHEIVRS

SEQ ID NO: 142382 - protein, 9 aa, Homo sapiens
VVHEIVRSF

SEQ ID NO: 142383 - protein, 9 aa, Homo sapiens
VHEIVRSFG

SEQ ID NO: 142384 - protein, 9 aa, Homo sapiens
HEIVRSFGT

SEQ ID NO: 142385 - protein, 9 aa, Homo sapiens
EIVRSFGTL

SEQ ID NO: 142386 - protein, 9 aa, Homo sapiens
IVRSFGTLK

SEQ ID NO: 142387 - protein, 9 aa, Homo sapiens
VRSFGTLKK

SEQ ID NO: 142388 - protein, 9 aa, Homo sapiens
RSFGTLKKE

SEQ ID NO: 142389 - protein, 9 aa, Homo sapiens
SFGTLKKEG

SEQ ID NO: 142390 - protein, 9 aa, Homo sapiens
FGTLKKEGW

SEQ ID NO: 142391 - protein, 9 aa, Homo sapiens
GTLKKEGWR

SEQ ID NO: 142392 - protein, 9 aa, Homo sapiens
TLKKEGWRP

SEQ ID NO: 142393 - protein, 9 aa, Homo sapiens
LKKEGWRPR

SEQ ID NO: 142394 - protein, 9 aa, Homo sapiens
KKEGWRPRR

SEQ ID NO: 142395 - protein, 9 aa, Homo sapiens
KEGWRPRRT

SEQ ID NO: 142396 - protein, 9 aa, Homo sapiens
EGWRPRRTI

SEQ ID NO: 142397 - protein, 9 aa, Homo sapiens
GWRPRRTIL

SEQ ID NO: 142398 - protein, 9 aa, Homo sapiens
WRPRRTILF

SEQ ID NO: 142399 - protein, 9 aa, Homo sapiens
RPRRTILFA

SEQ ID NO: 142400 - protein, 9 aa, Homo sapiens
PRRTILFAS

SEQ ID NO: 142401 - protein, 9 aa, Homo sapiens
RRTILFASW

SEQ ID NO: 142402 - protein, 9 aa, Homo sapiens
RTILFASWD

SEQ ID NO: 142403 - protein, 9 aa, Homo sapiens
TILFASWDA

SEQ ID NO: 142404 - protein, 9 aa, Homo sapiens
ILFASWDAE

SEQ ID NO: 142405 - protein, 9 aa, Homo sapiens
LFASWDAEE

SEQ ID NO: 142406 - protein, 9 aa, Homo sapiens
FASWDAEEF

SEQ ID NO: 142407 - protein, 9 aa, Homo sapiens
ASWDAEEFG

SEQ ID NO: 142408 - protein, 9 aa, Homo sapiens
SWDAEEFGL

SEQ ID NO: 142409 - protein, 9 aa, Homo sapiens
WDAEEFGLL

SEQ ID NO: 142410 - protein, 9 aa, Homo sapiens
DAEEFGLLG

SEQ ID NO: 142411 - protein, 9 aa, Homo sapiens
AEEFGLLGS

SEQ ID NO: 142412 - protein, 9 aa, Homo sapiens
EEFGLLGST

SEQ ID NO: 142413 - protein, 9 aa, Homo sapiens
EFGLLGSTE

SEQ ID NO: 142414 - protein, 9 aa, Homo sapiens
FGLLGSTEW

SEQ ID NO: 142415 - protein, 9 aa, Homo sapiens
GLLGSTEWA

SEQ ID NO: 142416 - protein, 9 aa, Homo sapiens
LLGSTEWAE

SEQ ID NO: 142417 - protein, 9 aa, Homo sapiens
LGSTEWAEE

SEQ ID NO: 142418 - protein, 9 aa, Homo sapiens
GSTEWAEEN

SEQ ID NO: 142419 - protein, 9 aa, Homo sapiens
STEWAEENS

SEQ ID NO: 142420 - protein, 9 aa, Homo sapiens
TEWAEENSR

SEQ ID NO: 142421 - protein, 9 aa, Homo sapiens
EWAEENSRL

SEQ ID NO: 142422 - protein, 9 aa, Homo sapiens
WAEENSRLL

SEQ ID NO: 142423 - protein, 9 aa, Homo sapiens
AEENSRLLQ

SEQ ID NO: 142424 - protein, 9 aa, Homo sapiens
EENSRLLQE

SEQ ID NO: 142425 - protein, 9 aa, Homo sapiens
ENSRLLQER

SEQ ID NO: 142426 - protein, 9 aa, Homo sapiens
NSRLLQERG

SEQ ID NO: 142427 - protein, 9 aa, Homo sapiens
SRLLQERGV

SEQ ID NO: 142428 - protein, 9 aa, Homo sapiens
RLLQERGVA

SEQ ID NO: 142429 - protein, 9 aa, Homo sapiens
LLQERGVAY

SEQ ID NO: 142430 - protein, 9 aa, Homo sapiens
LQERGVAYI

SEQ ID NO: 142431 - protein, 9 aa, Homo sapiens
QERGVAYIN

SEQ ID NO: 142432 - protein, 9 aa, Homo sapiens
ERGVAYINA

SEQ ID NO: 142433 - protein, 9 aa, Homo sapiens
RGVAYINAD

SEQ ID NO: 142434 - protein, 9 aa, Homo sapiens
GVAYINADS

SEQ ID NO: 142435 - protein, 9 aa, Homo sapiens
VAYINADSS

SEQ ID NO: 142436 - protein, 9 aa, Homo sapiens
AYINADSSI

SEQ ID NO: 142437 - protein, 9 aa, Homo sapiens
YINADSSIE

SEQ ID NO: 142438 - protein, 9 aa, Homo sapiens
INADSSIEG

SEQ ID NO: 142439 - protein, 9 aa, Homo sapiens
NADSSIEGN

SEQ ID NO: 142440 - protein, 9 aa, Homo sapiens
ADSSIEGNY

SEQ ID NO: 142441 - protein, 9 aa, Homo sapiens
DSSIEGNYT

SEQ ID NO: 142442 - protein, 9 aa, Homo sapiens
SSIEGNYTL

SEQ ID NO: 142443 - protein, 9 aa, Homo sapiens
SIEGNYTLR

SEQ ID NO: 142444 - protein, 9 aa, Homo sapiens
IEGNYTLRV

SEQ ID NO: 142445 - protein, 9 aa, Homo sapiens
EGNYTLRVD

SEQ ID NO: 142446 - protein, 9 aa, Homo sapiens
GNYTLRVDC

SEQ ID NO: 142447 - protein, 9 aa, Homo sapiens
NYTLRVDCT

SEQ ID NO: 142448 - protein, 9 aa, Homo sapiens
YTLRVDCTP

SEQ ID NO: 142449 - protein, 9 aa, Homo sapiens
TLRVDCTPL

SEQ ID NO: 142450 - protein, 9 aa, Homo sapiens
LRVDCTPLM

SEQ ID NO: 142451 - protein, 9 aa, Homo sapiens
RVDCTPLMY

SEQ ID NO: 142452 - protein, 9 aa, Homo sapiens
VDCTPLMYS

SEQ ID NO: 142453 - protein, 9 aa, Homo sapiens
DCTPLMYSL

SEQ ID NO: 142454 - protein, 9 aa, Homo sapiens
CTPLMYSLV

SEQ ID NO: 142455 - protein, 9 aa, Homo sapiens
TPLMYSLVH

SEQ ID NO: 142456 - protein, 9 aa, Homo sapiens
PLMYSLVHN

SEQ ID NO: 142457 - protein, 9 aa, Homo sapiens
LMYSLVHNL

SEQ ID NO: 142458 - protein, 9 aa, Homo sapiens
MYSLVHNLT

SEQ ID NO: 142459 - protein, 9 aa, Homo sapiens
YSLVHNLTK

SEQ ID NO: 142460 - protein, 9 aa, Homo sapiens
SLVHNLTKE

SEQ ID NO: 142461 - protein, 9 aa, Homo sapiens
LVHNLTKEL

SEQ ID NO: 142462 - protein, 9 aa, Homo sapiens
VHNLTKELK

SEQ ID NO: 142463 - protein, 9 aa, Homo sapiens
HNLTKELKS

SEQ ID NO: 142464 - protein, 9 aa, Homo sapiens
NLTKELKSP

SEQ ID NO: 142465 - protein, 9 aa, Homo sapiens
LTKELKSPD

SEQ ID NO: 142466 - protein, 9 aa, Homo sapiens
TKELKSPDE

SEQ ID NO: 142467 - protein, 9 aa, Homo sapiens
KELKSPDEG

SEQ ID NO: 142468 - protein, 9 aa, Homo sapiens
ELKSPDEGF

SEQ ID NO: 142469 - protein, 9 aa, Homo sapiens
LKSPDEGFE

SEQ ID NO: 142470 - protein, 9 aa, Homo sapiens
KSPDEGFEG

SEQ ID NO: 142471 - protein, 9 aa, Homo sapiens
SPDEGFEGK

SEQ ID NO: 142472 - protein, 9 aa, Homo sapiens
PDEGFEGKS

SEQ ID NO: 142473 - protein, 9 aa, Homo sapiens
DEGFEGKSL

SEQ ID NO: 142474 - protein, 9 aa, Homo sapiens
EGFEGKSLY

SEQ ID NO: 142475 - protein, 9 aa, Homo sapiens
GFEGKSLYE

SEQ ID NO: 142476 - protein, 9 aa, Homo sapiens
FEGKSLYES

SEQ ID NO: 142477 - protein, 9 aa, Homo sapiens
EGKSLYESW

SEQ ID NO: 142478 - protein, 9 aa, Homo sapiens
GKSLYESWT

SEQ ID NO: 142479 - protein, 9 aa, Homo sapiens
KSLYESWTK

SEQ ID NO: 142480 - protein, 9 aa, Homo sapiens
SLYESWTKK

SEQ ID NO: 142481 - protein, 9 aa, Homo sapiens
LYESWTKKS

SEQ ID NO: 142482 - protein, 9 aa, Homo sapiens
YESWTKKSP

SEQ ID NO: 142483 - protein, 9 aa, Homo sapiens
ESWTKKSPS

SEQ ID NO: 142484 - protein, 9 aa, Homo sapiens
SWTKKSPSP

SEQ ID NO: 142485 - protein, 9 aa, Homo sapiens
WTKKSPSPE

SEQ ID NO: 142486 - protein, 9 aa, Homo sapiens
TKKSPSPEF

SEQ ID NO: 142487 - protein, 9 aa, Homo sapiens
KKSPSPEFS

SEQ ID NO: 142488 - protein, 9 aa, Homo sapiens
KSPSPEFSG

SEQ ID NO: 142489 - protein, 9 aa, Homo sapiens
SPSPEFSGM

SEQ ID NO: 142490 - protein, 9 aa, Homo sapiens
PSPEFSGMP

SEQ ID NO: 142491 - protein, 9 aa, Homo sapiens
SPEFSGMPR

SEQ ID NO: 142492 - protein, 9 aa, Homo sapiens
PEFSGMPRI

SEQ ID NO: 142493 - protein, 9 aa, Homo sapiens
EFSGMPRIS

SEQ ID NO: 142494 - protein, 9 aa, Homo sapiens
FSGMPRISK

SEQ ID NO: 142495 - protein, 9 aa, Homo sapiens
SGMPRISKL

SEQ ID NO: 142496 - protein, 9 aa, Homo sapiens
GMPRISKLG

SEQ ID NO: 142497 - protein, 9 aa, Homo sapiens
MPRISKLGS

SEQ ID NO: 142498 - protein, 9 aa, Homo sapiens
PRISKLGSG

SEQ ID NO: 142499 - protein, 9 aa, Homo sapiens
RISKLGSGN

SEQ ID NO: 142500 - protein, 9 aa, Homo sapiens
ISKLGSGND

SEQ ID NO: 142501 - protein, 9 aa, Homo sapiens
SKLGSGNDF

SEQ ID NO: 142502 - protein, 9 aa, Homo sapiens
KLGSGNDFE

SEQ ID NO: 142503 - protein, 9 aa, Homo sapiens
LGSGNDFEV

SEQ ID NO: 142504 - protein, 9 aa, Homo sapiens
GSGNDFEVF

SEQ ID NO: 142505 - protein, 9 aa, Homo sapiens
SGNDFEVFF

SEQ ID NO: 142506 - protein, 9 aa, Homo sapiens
GNDFEVFFQ

SEQ ID NO: 142507 - protein, 9 aa, Homo sapiens
NDFEVFFQR

SEQ ID NO: 142508 - protein, 9 aa, Homo sapiens
DFEVFFQRL

SEQ ID NO: 142509 - protein, 9 aa, Homo sapiens
FEVFFQRLG

SEQ ID NO: 142510 - protein, 9 aa, Homo sapiens
EVFFQRLGI

SEQ ID NO: 142511 - protein, 9 aa, Homo sapiens
VFFQRLGIA

SEQ ID NO: 142512 - protein, 9 aa, Homo sapiens
FFQRLGIAS

SEQ ID NO: 142513 - protein, 9 aa, Homo sapiens
FQRLGIASG

SEQ ID NO: 142514 - protein, 9 aa, Homo sapiens
QRLGIASGR

SEQ ID NO: 142515 - protein, 9 aa, Homo sapiens
RLGIASGRA

SEQ ID NO: 142516 - protein, 9 aa, Homo sapiens
LGIASGRAR

SEQ ID NO: 142517 - protein, 9 aa, Homo sapiens
GIASGRARY

SEQ ID NO: 142518 - protein, 9 aa, Homo sapiens
IASGRARYT

SEQ ID NO: 142519 - protein, 9 aa, Homo sapiens
ASGRARYTK

SEQ ID NO: 142520 - protein, 9 aa, Homo sapiens
SGRARYTKN

SEQ ID NO: 142521 - protein, 9 aa, Homo sapiens
GRARYTKNW

SEQ ID NO: 142522 - protein, 9 aa, Homo sapiens
RARYTKNWE

SEQ ID NO: 142523 - protein, 9 aa, Homo sapiens
ARYTKNWET

SEQ ID NO: 142524 - protein, 9 aa, Homo sapiens
RYTKNWETN

SEQ ID NO: 142525 - protein, 9 aa, Homo sapiens
YTKNWETNK

SEQ ID NO: 142526 - protein, 9 aa, Homo sapiens
TKNWETNKF

SEQ ID NO: 142527 - protein, 9 aa, Homo sapiens
KNWETNKFS

SEQ ID NO: 142528 - protein, 9 aa, Homo sapiens
NWETNKFSG

SEQ ID NO: 142529 - protein, 9 aa, Homo sapiens
WETNKFSGY

SEQ ID NO: 142530 - protein, 9 aa, Homo sapiens
ETNKFSGYP

SEQ ID NO: 142531 - protein, 9 aa, Homo sapiens
TNKFSGYPL

SEQ ID NO: 142532 - protein, 9 aa, Homo sapiens
NKFSGYPLY

SEQ ID NO: 142533 - protein, 9 aa, Homo sapiens
KFSGYPLYH

SEQ ID NO: 142534 - protein, 9 aa, Homo sapiens
FSGYPLYHS

SEQ ID NO: 142535 - protein, 9 aa, Homo sapiens
SGYPLYHSV

SEQ ID NO: 142536 - protein, 9 aa, Homo sapiens
GYPLYHSVY

SEQ ID NO: 142537 - protein, 9 aa, Homo sapiens
YPLYHSVYE

SEQ ID NO: 142538 - protein, 9 aa, Homo sapiens
PLYHSVYET

SEQ ID NO: 142539 - protein, 9 aa, Homo sapiens
LYHSVYETY

SEQ ID NO: 142540 - protein, 9 aa, Homo sapiens
YHSVYETYE

SEQ ID NO: 142541 - protein, 9 aa, Homo sapiens
HSVYETYEL

SEQ ID NO: 142542 - protein, 9 aa, Homo sapiens
SVYETYELV

SEQ ID NO: 142543 - protein, 9 aa, Homo sapiens
VYETYELVE

SEQ ID NO: 142544 - protein, 9 aa, Homo sapiens
YETYELVEK

SEQ ID NO: 142545 - protein, 9 aa, Homo sapiens
ETYELVEKF

SEQ ID NO: 142546 - protein, 9 aa, Homo sapiens
TYELVEKFY

SEQ ID NO: 142547 - protein, 9 aa, Homo sapiens
YELVEKFYD

SEQ ID NO: 142548 - protein, 9 aa, Homo sapiens
ELVEKFYDP

SEQ ID NO: 142549 - protein, 9 aa, Homo sapiens
LVEKFYDPM

SEQ ID NO: 142550 - protein, 9 aa, Homo sapiens
VEKFYDPMF

SEQ ID NO: 142551 - protein, 9 aa, Homo sapiens
EKFYDPMFK

SEQ ID NO: 142552 - protein, 9 aa, Homo sapiens
KFYDPMFKY

SEQ ID NO: 142553 - protein, 9 aa, Homo sapiens
FYDPMFKYH

SEQ ID NO: 142554 - protein, 9 aa, Homo sapiens
YDPMFKYHL

SEQ ID NO: 142555 - protein, 9 aa, Homo sapiens
DPMFKYHLT

SEQ ID NO: 142556 - protein, 9 aa, Homo sapiens
PMFKYHLTV

SEQ ID NO: 142557 - protein, 9 aa, Homo sapiens
MFKYHLTVA

SEQ ID NO: 142558 - protein, 9 aa, Homo sapiens
FKYHLTVAQ

SEQ ID NO: 142559 - protein, 9 aa, Homo sapiens
KYHLTVAQV

SEQ ID NO: 142560 - protein, 9 aa, Homo sapiens
YHLTVAQVR

SEQ ID NO: 142561 - protein, 9 aa, Homo sapiens
HLTVAQVRG

SEQ ID NO: 142562 - protein, 9 aa, Homo sapiens
LTVAQVRGG

SEQ ID NO: 142563 - protein, 9 aa, Homo sapiens
TVAQVRGGM

SEQ ID NO: 142564 - protein, 9 aa, Homo sapiens
VAQVRGGMV

SEQ ID NO: 142565 - protein, 9 aa, Homo sapiens
AQVRGGMVF

SEQ ID NO: 142566 - protein, 9 aa, Homo sapiens
QVRGGMVFE

SEQ ID NO: 142567 - protein, 9 aa, Homo sapiens
VRGGMVFEL

SEQ ID NO: 142568 - protein, 9 aa, Homo sapiens
RGGMVFELA

SEQ ID NO: 142569 - protein, 9 aa, Homo sapiens
GGMVFELAN

SEQ ID NO: 142570 - protein, 9 aa, Homo sapiens
GMVFELANS

SEQ ID NO: 142571 - protein, 9 aa, Homo sapiens
MVFELANSI

SEQ ID NO: 142572 - protein, 9 aa, Homo sapiens
VFELANSIV

SEQ ID NO: 142573 - protein, 9 aa, Homo sapiens
FELANSIVL

SEQ ID NO: 142574 - protein, 9 aa, Homo sapiens
ELANSIVLP

SEQ ID NO: 142575 - protein, 9 aa, Homo sapiens
LANSIVLPF

SEQ ID NO: 142576 - protein, 9 aa, Homo sapiens
ANSIVLPFD

SEQ ID NO: 142577 - protein, 9 aa, Homo sapiens
NSIVLPFDC

SEQ ID NO: 142578 - protein, 9 aa, Homo sapiens
SIVLPFDCR

SEQ ID NO: 142579 - protein, 9 aa, Homo sapiens
IVLPFDCRD

SEQ ID NO: 142580 - protein, 9 aa, Homo sapiens
VLPFDCRDY

SEQ ID NO: 142581 - protein, 9 aa, Homo sapiens
LPFDCRDYA

SEQ ID NO: 142582 - protein, 9 aa, Homo sapiens
PFDCRDYAV

SEQ ID NO: 142583 - protein, 9 aa, Homo sapiens
FDCRDYAVV

SEQ ID NO: 142584 - protein, 9 aa, Homo sapiens
DCRDYAVVL

SEQ ID NO: 142585 - protein, 9 aa, Homo sapiens
CRDYAVVLR

SEQ ID NO: 142586 - protein, 9 aa, Homo sapiens
RDYAVVLRK

SEQ ID NO: 142587 - protein, 9 aa, Homo sapiens
DYAVVLRKY

SEQ ID NO: 142588 - protein, 9 aa, Homo sapiens
YAVVLRKYA

SEQ ID NO: 142589 - protein, 9 aa, Homo sapiens
AVVLRKYAD

SEQ ID NO: 142590 - protein, 9 aa, Homo sapiens
VVLRKYADK

SEQ ID NO: 142591 - protein, 9 aa, Homo sapiens
VLRKYADKI

SEQ ID NO: 142592 - protein, 9 aa, Homo sapiens
LRKYADKIY

SEQ ID NO: 142593 - protein, 9 aa, Homo sapiens
RKYADKIYS

SEQ ID NO: 142594 - protein, 9 aa, Homo sapiens
KYADKIYSI

SEQ ID NO: 142595 - protein, 9 aa, Homo sapiens
YADKIYSIS

SEQ ID NO: 142596 - protein, 9 aa, Homo sapiens
ADKIYSISM

SEQ ID NO: 142597 - protein, 9 aa, Homo sapiens
DKIYSISMK

SEQ ID NO: 142598 - protein, 9 aa, Homo sapiens
KIYSISMKH

SEQ ID NO: 142599 - protein, 9 aa, Homo sapiens
IYSISMKHP

SEQ ID NO: 142600 - protein, 9 aa, Homo sapiens
YSISMKHPQ

SEQ ID NO: 142601 - protein, 9 aa, Homo sapiens
SISMKHPQE

SEQ ID NO: 142602 - protein, 9 aa, Homo sapiens
ISMKHPQEM

SEQ ID NO: 142603 - protein, 9 aa, Homo sapiens
SMKHPQEMK

SEQ ID NO: 142604 - protein, 9 aa, Homo sapiens
MKHPQEMKT

SEQ ID NO: 142605 - protein, 9 aa, Homo sapiens
KHPQEMKTY

SEQ ID NO: 142606 - protein, 9 aa, Homo sapiens
HPQEMKTYS

SEQ ID NO: 142607 - protein, 9 aa, Homo sapiens
PQEMKTYSV

SEQ ID NO: 142608 - protein, 9 aa, Homo sapiens
QEMKTYSVS

SEQ ID NO: 142609 - protein, 9 aa, Homo sapiens
EMKTYSVSF

SEQ ID NO: 142610 - protein, 9 aa, Homo sapiens
MKTYSVSFD

SEQ ID NO: 142611 - protein, 9 aa, Homo sapiens
KTYSVSFDS

SEQ ID NO: 142612 - protein, 9 aa, Homo sapiens
TYSVSFDSL

SEQ ID NO: 142613 - protein, 9 aa, Homo sapiens
YSVSFDSLF

SEQ ID NO: 142614 - protein, 9 aa, Homo sapiens
SVSFDSLFS

SEQ ID NO: 142615 - protein, 9 aa, Homo sapiens
VSFDSLFSA

SEQ ID NO: 142616 - protein, 9 aa, Homo sapiens
SFDSLFSAV

SEQ ID NO: 142617 - protein, 9 aa, Homo sapiens
FDSLFSAVK

SEQ ID NO: 142618 - protein, 9 aa, Homo sapiens
DSLFSAVKN

SEQ ID NO: 142619 - protein, 9 aa, Homo sapiens
SLFSAVKNF

SEQ ID NO: 142620 - protein, 9 aa, Homo sapiens
LFSAVKNFT

SEQ ID NO: 142621 - protein, 9 aa, Homo sapiens
FSAVKNFTE

SEQ ID NO: 142622 - protein, 9 aa, Homo sapiens
SAVKNFTEI

SEQ ID NO: 142623 - protein, 9 aa, Homo sapiens
AVKNFTEIA

SEQ ID NO: 142624 - protein, 9 aa, Homo sapiens
VKNFTEIAS

SEQ ID NO: 142625 - protein, 9 aa, Homo sapiens
KNFTEIASK

SEQ ID NO: 142626 - protein, 9 aa, Homo sapiens
NFTEIASKF

SEQ ID NO: 142627 - protein, 9 aa, Homo sapiens
FTEIASKFS

SEQ ID NO: 142628 - protein, 9 aa, Homo sapiens
TEIASKFSE

SEQ ID NO: 142629 - protein, 9 aa, Homo sapiens
EIASKFSER

SEQ ID NO: 142630 - protein, 9 aa, Homo sapiens
IASKFSERL

SEQ ID NO: 142631 - protein, 9 aa, Homo sapiens
ASKFSERLQ

SEQ ID NO: 142632 - protein, 9 aa, Homo sapiens
SKFSERLQD

SEQ ID NO: 142633 - protein, 9 aa, Homo sapiens
KFSERLQDF

SEQ ID NO: 142634 - protein, 9 aa, Homo sapiens
FSERLQDFD

SEQ ID NO: 142635 - protein, 9 aa, Homo sapiens
SERLQDFDK

SEQ ID NO: 142636 - protein, 9 aa, Homo sapiens
ERLQDFDKS

SEQ ID NO: 142637 - protein, 9 aa, Homo sapiens
RLQDFDKSN

SEQ ID NO: 142638 - protein, 9 aa, Homo sapiens
LQDFDKSNP

SEQ ID NO: 142639 - protein, 9 aa, Homo sapiens
QDFDKSNPI

SEQ ID NO: 142640 - protein, 9 aa, Homo sapiens
DFDKSNPIV

SEQ ID NO: 142641 - protein, 9 aa, Homo sapiens
FDKSNPIVL

SEQ ID NO: 142642 - protein, 9 aa, Homo sapiens
DKSNPIVLR

SEQ ID NO: 142643 - protein, 9 aa, Homo sapiens
KSNPIVLRM

SEQ ID NO: 142644 - protein, 9 aa, Homo sapiens
SNPIVLRMM

SEQ ID NO: 142645 - protein, 9 aa, Homo sapiens
NPIVLRMMN

SEQ ID NO: 142646 - protein, 9 aa, Homo sapiens
PIVLRMMND

SEQ ID NO: 142647 - protein, 9 aa, Homo sapiens
IVLRMMNDQ

SEQ ID NO: 142648 - protein, 9 aa, Homo sapiens
VLRMMNDQL

SEQ ID NO: 142649 - protein, 9 aa, Homo sapiens
LRMMNDQLM

SEQ ID NO: 142650 - protein, 9 aa, Homo sapiens
RMMNDQLMF

SEQ ID NO: 142651 - protein, 9 aa, Homo sapiens
MMNDQLMFL

SEQ ID NO: 142652 - protein, 9 aa, Homo sapiens
MNDQLMFLE

SEQ ID NO: 142653 - protein, 9 aa, Homo sapiens
NDQLMFLER

SEQ ID NO: 142654 - protein, 9 aa, Homo sapiens
DQLMFLERA

SEQ ID NO: 142655 - protein, 9 aa, Homo sapiens
QLMFLERAF

SEQ ID NO: 142656 - protein, 9 aa, Homo sapiens
LMFLERAFI

SEQ ID NO: 142657 - protein, 9 aa, Homo sapiens
MFLERAFID

SEQ ID NO: 142658 - protein, 9 aa, Homo sapiens
FLERAFIDP

SEQ ID NO: 142659 - protein, 9 aa, Homo sapiens
LERAFIDPL

SEQ ID NO: 142660 - protein, 9 aa, Homo sapiens
ERAFIDPLG

SEQ ID NO: 142661 - protein, 9 aa, Homo sapiens
RAFIDPLGL

SEQ ID NO: 142662 - protein, 9 aa, Homo sapiens
AFIDPLGLP

SEQ ID NO: 142663 - protein, 9 aa, Homo sapiens
FIDPLGLPD

SEQ ID NO: 142664 - protein, 9 aa, Homo sapiens
IDPLGLPDR

SEQ ID NO: 142665 - protein, 9 aa, Homo sapiens
DPLGLPDRP

SEQ ID NO: 142666 - protein, 9 aa, Homo sapiens
PLGLPDRPF

SEQ ID NO: 142667 - protein, 9 aa, Homo sapiens
LGLPDRPFY

SEQ ID NO: 142668 - protein, 9 aa, Homo sapiens
GLPDRPFYR

SEQ ID NO: 142669 - protein, 9 aa, Homo sapiens
LPDRPFYRH

SEQ ID NO: 142670 - protein, 9 aa, Homo sapiens
PDRPFYRHV

SEQ ID NO: 142671 - protein, 9 aa, Homo sapiens
DRPFYRHVI

SEQ ID NO: 142672 - protein, 9 aa, Homo sapiens
RPFYRHVIY

SEQ ID NO: 142673 - protein, 9 aa, Homo sapiens
PFYRHVIYA

SEQ ID NO: 142674 - protein, 9 aa, Homo sapiens
FYRHVIYAP

SEQ ID NO: 142675 - protein, 9 aa, Homo sapiens
YRHVIYAPS

SEQ ID NO: 142676 - protein, 9 aa, Homo sapiens
RHVIYAPSS

SEQ ID NO: 142677 - protein, 9 aa, Homo sapiens
HVIYAPSSH

SEQ ID NO: 142678 - protein, 9 aa, Homo sapiens
VIYAPSSHN

SEQ ID NO: 142679 - protein, 9 aa, Homo sapiens
IYAPSSHNK

SEQ ID NO: 142680 - protein, 9 aa, Homo sapiens
YAPSSHNKY

SEQ ID NO: 142681 - protein, 9 aa, Homo sapiens
APSSHNKYA

SEQ ID NO: 142682 - protein, 9 aa, Homo sapiens
PSSHNKYAG

SEQ ID NO: 142683 - protein, 9 aa, Homo sapiens
SSHNKYAGE

SEQ ID NO: 142684 - protein, 9 aa, Homo sapiens
SHNKYAGES

SEQ ID NO: 142685 - protein, 9 aa, Homo sapiens
HNKYAGESF

SEQ ID NO: 142686 - protein, 9 aa, Homo sapiens
NKYAGESFP

SEQ ID NO: 142687 - protein, 9 aa, Homo sapiens
KYAGESFPG

SEQ ID NO: 142688 - protein, 9 aa, Homo sapiens
YAGESFPGI

SEQ ID NO: 142689 - protein, 9 aa, Homo sapiens
AGESFPGIY

SEQ ID NO: 142690 - protein, 9 aa, Homo sapiens
GESFPGIYD

SEQ ID NO: 142691 - protein, 9 aa, Homo sapiens
ESFPGIYDA

SEQ ID NO: 142692 - protein, 9 aa, Homo sapiens
SFPGIYDAL

SEQ ID NO: 142693 - protein, 9 aa, Homo sapiens
FPGIYDALF

SEQ ID NO: 142694 - protein, 9 aa, Homo sapiens
PGIYDALFD

SEQ ID NO: 142695 - protein, 9 aa, Homo sapiens
GIYDALFDI

SEQ ID NO: 142696 - protein, 9 aa, Homo sapiens
IYDALFDIE

SEQ ID NO: 142697 - protein, 9 aa, Homo sapiens
YDALFDIES

SEQ ID NO: 142698 - protein, 9 aa, Homo sapiens
DALFDIESK

SEQ ID NO: 142699 - protein, 9 aa, Homo sapiens
ALFDIESKV

SEQ ID NO: 142700 - protein, 9 aa, Homo sapiens
LFDIESKVD

SEQ ID NO: 142701 - protein, 9 aa, Homo sapiens
FDIESKVDP

SEQ ID NO: 142702 - protein, 9 aa, Homo sapiens
DIESKVDPS

SEQ ID NO: 142703 - protein, 9 aa, Homo sapiens
IESKVDPSK

SEQ ID NO: 142704 - protein, 9 aa, Homo sapiens
ESKVDPSKA

SEQ ID NO: 142705 - protein, 9 aa, Homo sapiens
SKVDPSKAW

SEQ ID NO: 142706 - protein, 9 aa, Homo sapiens
KVDPSKAWG

SEQ ID NO: 142707 - protein, 9 aa, Homo sapiens
VDPSKAWGE

SEQ ID NO: 142708 - protein, 9 aa, Homo sapiens
DPSKAWGEV

SEQ ID NO: 142709 - protein, 9 aa, Homo sapiens
PSKAWGEVK

SEQ ID NO: 142710 - protein, 9 aa, Homo sapiens
SKAWGEVKR

SEQ ID NO: 142711 - protein, 9 aa, Homo sapiens
KAWGEVKRQ

SEQ ID NO: 142712 - protein, 9 aa, Homo sapiens
AWGEVKRQI

SEQ ID NO: 142713 - protein, 9 aa, Homo sapiens
WGEVKRQIY

SEQ ID NO: 142714 - protein, 9 aa, Homo sapiens
GEVKRQIYV

SEQ ID NO: 142715 - protein, 9 aa, Homo sapiens
EVKRQIYVA

SEQ ID NO: 142716 - protein, 9 aa, Homo sapiens
VKRQIYVAA

SEQ ID NO: 142717 - protein, 9 aa, Homo sapiens
KRQIYVAAF

SEQ ID NO: 142718 - protein, 9 aa, Homo sapiens
RQIYVAAFT

SEQ ID NO: 142719 - protein, 9 aa, Homo sapiens
QIYVAAFTV

SEQ ID NO: 142720 - protein, 9 aa, Homo sapiens
IYVAAFTVQ

SEQ ID NO: 142721 - protein, 9 aa, Homo sapiens
YVAAFTVQA

SEQ ID NO: 142722 - protein, 9 aa, Homo sapiens
VAAFTVQAA

SEQ ID NO: 142723 - protein, 9 aa, Homo sapiens
AAFTVQAAA

SEQ ID NO: 142724 - protein, 9 aa, Homo sapiens
AFTVQAAAE

SEQ ID NO: 142725 - protein, 9 aa, Homo sapiens
FTVQAAAET

SEQ ID NO: 142726 - protein, 9 aa, Homo sapiens
TVQAAAETL

SEQ ID NO: 142727 - protein, 9 aa, Homo sapiens
VQAAAETLS

SEQ ID NO: 142728 - protein, 9 aa, Homo sapiens
QAAAETLSE

SEQ ID NO: 142729 - protein, 9 aa, Homo sapiens
AAAETLSEV

SEQ ID NO: 142730 - protein, 9 aa, Homo sapiens
AAETLSEVA

SEQ ID NO: 142731 - protein, 9 aa, Homo sapiens
MATPIRTVR

SEQ ID NO: 142732 - protein, 9 aa, Homo sapiens
ATPIRTVRQ

SEQ ID NO: 142733 - protein, 9 aa, Homo sapiens
TPIRTVRQL

SEQ ID NO: 142734 - protein, 9 aa, Homo sapiens
PIRTVRQLS

SEQ ID NO: 142735 - protein, 9 aa, Homo sapiens
IRTVRQLSE

SEQ ID NO: 142736 - protein, 9 aa, Homo sapiens
RTVRQLSES

SEQ ID NO: 142737 - protein, 9 aa, Homo sapiens
TVRQLSESL

SEQ ID NO: 142738 - protein, 9 aa, Homo sapiens
VRQLSESLC

SEQ ID NO: 142739 - protein, 9 aa, Homo sapiens
RQLSESLCI

SEQ ID NO: 142740 - protein, 9 aa, Homo sapiens
QLSESLCIP

SEQ ID NO: 142741 - protein, 9 aa, Homo sapiens
LSESLCIPY

SEQ ID NO: 142742 - protein, 9 aa, Homo sapiens
SESLCIPYI

SEQ ID NO: 142743 - protein, 9 aa, Homo sapiens
ESLCIPYID

SEQ ID NO: 142744 - protein, 9 aa, Homo sapiens
SLCIPYIDV

SEQ ID NO: 142745 - protein, 9 aa, Homo sapiens
LCIPYIDVL

SEQ ID NO: 142746 - protein, 9 aa, Homo sapiens
CIPYIDVLL

SEQ ID NO: 142747 - protein, 9 aa, Homo sapiens
IPYIDVLLP

SEQ ID NO: 142748 - protein, 9 aa, Homo sapiens
PYIDVLLPC

SEQ ID NO: 142749 - protein, 9 aa, Homo sapiens
YIDVLLPCN

SEQ ID NO: 142750 - protein, 9 aa, Homo sapiens
IDVLLPCNF

SEQ ID NO: 142751 - protein, 9 aa, Homo sapiens
DVLLPCNFC

SEQ ID NO: 142752 - protein, 9 aa, Homo sapiens
VLLPCNFCN

SEQ ID NO: 142753 - protein, 9 aa, Homo sapiens
LLPCNFCNY

SEQ ID NO: 142754 - protein, 9 aa, Homo sapiens
LPCNFCNYF

SEQ ID NO: 142755 - protein, 9 aa, Homo sapiens
PCNFCNYFL

SEQ ID NO: 142756 - protein, 9 aa, Homo sapiens
CNFCNYFLS

SEQ ID NO: 142757 - protein, 9 aa, Homo sapiens
NFCNYFLSN

SEQ ID NO: 142758 - protein, 9 aa, Homo sapiens
FCNYFLSNA

SEQ ID NO: 142759 - protein, 9 aa, Homo sapiens
CNYFLSNAE

SEQ ID NO: 142760 - protein, 9 aa, Homo sapiens
NYFLSNAEK

SEQ ID NO: 142761 - protein, 9 aa, Homo sapiens
YFLSNAEKL

SEQ ID NO: 142762 - protein, 9 aa, Homo sapiens
FLSNAEKLL

SEQ ID NO: 142763 - protein, 9 aa, Homo sapiens
LSNAEKLLF

SEQ ID NO: 142764 - protein, 9 aa, Homo sapiens
SNAEKLLFD

SEQ ID NO: 142765 - protein, 9 aa, Homo sapiens
NAEKLLFDH

SEQ ID NO: 142766 - protein, 9 aa, Homo sapiens
AEKLLFDHF

SEQ ID NO: 142767 - protein, 9 aa, Homo sapiens
EKLLFDHFD

SEQ ID NO: 142768 - protein, 9 aa, Homo sapiens
KLLFDHFDL

SEQ ID NO: 142769 - protein, 9 aa, Homo sapiens
LLFDHFDLH

SEQ ID NO: 142770 - protein, 9 aa, Homo sapiens
LFDHFDLHL

SEQ ID NO: 142771 - protein, 9 aa, Homo sapiens
FDHFDLHLV

SEQ ID NO: 142772 - protein, 9 aa, Homo sapiens
DHFDLHLVW

SEQ ID NO: 142773 - protein, 9 aa, Homo sapiens
HFDLHLVWR

SEQ ID NO: 142774 - protein, 9 aa, Homo sapiens
FDLHLVWRD

SEQ ID NO: 142775 - protein, 9 aa, Homo sapiens
DLHLVWRDN

SEQ ID NO: 142776 - protein, 9 aa, Homo sapiens
LHLVWRDNL

SEQ ID NO: 142777 - protein, 9 aa, Homo sapiens
HLVWRDNLV

SEQ ID NO: 142778 - protein, 9 aa, Homo sapiens
LVWRDNLVF

SEQ ID NO: 142779 - protein, 9 aa, Homo sapiens
VWRDNLVFG

SEQ ID NO: 142780 - protein, 9 aa, Homo sapiens
WRDNLVFGC

SEQ ID NO: 142781 - protein, 9 aa, Homo sapiens
RDNLVFGCC

SEQ ID NO: 142782 - protein, 9 aa, Homo sapiens
DNLVFGCCQ

SEQ ID NO: 142783 - protein, 9 aa, Homo sapiens
NLVFGCCQG

SEQ ID NO: 142784 - protein, 9 aa, Homo sapiens
LVFGCCQGC

SEQ ID NO: 142785 - protein, 9 aa, Homo sapiens
VFGCCQGCA

SEQ ID NO: 142786 - protein, 9 aa, Homo sapiens
FGCCQGCAR

SEQ ID NO: 142787 - protein, 9 aa, Homo sapiens
GCCQGCART

SEQ ID NO: 142788 - protein, 9 aa, Homo sapiens
CCQGCARTV

SEQ ID NO: 142789 - protein, 9 aa, Homo sapiens
CQGCARTVS

SEQ ID NO: 142790 - protein, 9 aa, Homo sapiens
QGCARTVSL

SEQ ID NO: 142791 - protein, 9 aa, Homo sapiens
GCARTVSLL

SEQ ID NO: 142792 - protein, 9 aa, Homo sapiens
CARTVSLLE

SEQ ID NO: 142793 - protein, 9 aa, Homo sapiens
ARTVSLLEF

SEQ ID NO: 142794 - protein, 9 aa, Homo sapiens
RTVSLLEFV

SEQ ID NO: 142795 - protein, 9 aa, Homo sapiens
TVSLLEFVL

SEQ ID NO: 142796 - protein, 9 aa, Homo sapiens
VSLLEFVLY

SEQ ID NO: 142797 - protein, 9 aa, Homo sapiens
SLLEFVLYY

SEQ ID NO: 142798 - protein, 9 aa, Homo sapiens
LLEFVLYYQ

SEQ ID NO: 142799 - protein, 9 aa, Homo sapiens
LEFVLYYQE

SEQ ID NO: 142800 - protein, 9 aa, Homo sapiens
EFVLYYQES

SEQ ID NO: 142801 - protein, 9 aa, Homo sapiens
FVLYYQESY

SEQ ID NO: 142802 - protein, 9 aa, Homo sapiens
VLYYQESYE

SEQ ID NO: 142803 - protein, 9 aa, Homo sapiens
LYYQESYEV

SEQ ID NO: 142804 - protein, 9 aa, Homo sapiens
YYQESYEVP

SEQ ID NO: 142805 - protein, 9 aa, Homo sapiens
YQESYEVPE

SEQ ID NO: 142806 - protein, 9 aa, Homo sapiens
QESYEVPEI

SEQ ID NO: 142807 - protein, 9 aa, Homo sapiens
ESYEVPEIE

SEQ ID NO: 142808 - protein, 9 aa, Homo sapiens
SYEVPEIEE

SEQ ID NO: 142809 - protein, 9 aa, Homo sapiens
YEVPEIEEI

SEQ ID NO: 142810 - protein, 9 aa, Homo sapiens
EVPEIEEIL

SEQ ID NO: 142811 - protein, 9 aa, Homo sapiens
VPEIEEILD

SEQ ID NO: 142812 - protein, 9 aa, Homo sapiens
PEIEEILDR

SEQ ID NO: 142813 - protein, 9 aa, Homo sapiens
EIEEILDRP

SEQ ID NO: 142814 - protein, 9 aa, Homo sapiens
IEEILDRPL

SEQ ID NO: 142815 - protein, 9 aa, Homo sapiens
EEILDRPLL

SEQ ID NO: 142816 - protein, 9 aa, Homo sapiens
EILDRPLLQ

SEQ ID NO: 142817 - protein, 9 aa, Homo sapiens
ILDRPLLQI

SEQ ID NO: 142818 - protein, 9 aa, Homo sapiens
LDRPLLQIE

SEQ ID NO: 142819 - protein, 9 aa, Homo sapiens
DRPLLQIEL

SEQ ID NO: 142820 - protein, 9 aa, Homo sapiens
RPLLQIELR

SEQ ID NO: 142821 - protein, 9 aa, Homo sapiens
PLLQIELRC

SEQ ID NO: 142822 - protein, 9 aa, Homo sapiens
LLQIELRCV

SEQ ID NO: 142823 - protein, 9 aa, Homo sapiens
LQIELRCVT

SEQ ID NO: 142824 - protein, 9 aa, Homo sapiens
QIELRCVTC

SEQ ID NO: 142825 - protein, 9 aa, Homo sapiens
IELRCVTCI

SEQ ID NO: 142826 - protein, 9 aa, Homo sapiens
ELRCVTCIK

SEQ ID NO: 142827 - protein, 9 aa, Homo sapiens
LRCVTCIKK

SEQ ID NO: 142828 - protein, 9 aa, Homo sapiens
RCVTCIKKL

SEQ ID NO: 142829 - protein, 9 aa, Homo sapiens
CVTCIKKLS

SEQ ID NO: 142830 - protein, 9 aa, Homo sapiens
VTCIKKLSV

SEQ ID NO: 142831 - protein, 9 aa, Homo sapiens
TCIKKLSVA

SEQ ID NO: 142832 - protein, 9 aa, Homo sapiens
CIKKLSVAE

SEQ ID NO: 142833 - protein, 9 aa, Homo sapiens
IKKLSVAEK

SEQ ID NO: 142834 - protein, 9 aa, Homo sapiens
KKLSVAEKL

SEQ ID NO: 142835 - protein, 9 aa, Homo sapiens
KLSVAEKLE

SEQ ID NO: 142836 - protein, 9 aa, Homo sapiens
LSVAEKLEV

SEQ ID NO: 142837 - protein, 9 aa, Homo sapiens
SVAEKLEVV

SEQ ID NO: 142838 - protein, 9 aa, Homo sapiens
VAEKLEVVS

SEQ ID NO: 142839 - protein, 9 aa, Homo sapiens
AEKLEVVSN

SEQ ID NO: 142840 - protein, 9 aa, Homo sapiens
EKLEVVSNG

SEQ ID NO: 142841 - protein, 9 aa, Homo sapiens
KLEVVSNGE

SEQ ID NO: 142842 - protein, 9 aa, Homo sapiens
LEVVSNGER

SEQ ID NO: 142843 - protein, 9 aa, Homo sapiens
EVVSNGERV

SEQ ID NO: 142844 - protein, 9 aa, Homo sapiens
VVSNGERVH

SEQ ID NO: 142845 - protein, 9 aa, Homo sapiens
VSNGERVHR

SEQ ID NO: 142846 - protein, 9 aa, Homo sapiens
SNGERVHRV

SEQ ID NO: 142847 - protein, 9 aa, Homo sapiens
NGERVHRVR

SEQ ID NO: 142848 - protein, 9 aa, Homo sapiens
GERVHRVRN

SEQ ID NO: 142849 - protein, 9 aa, Homo sapiens
ERVHRVRNR

SEQ ID NO: 142850 - protein, 9 aa, Homo sapiens
RVHRVRNRL

SEQ ID NO: 142851 - protein, 9 aa, Homo sapiens
VHRVRNRLK

SEQ ID NO: 142852 - protein, 9 aa, Homo sapiens
HRVRNRLKA

SEQ ID NO: 142853 - protein, 9 aa, Homo sapiens
RVRNRLKAK

SEQ ID NO: 142854 - protein, 9 aa, Homo sapiens
VRNRLKAKC

SEQ ID NO: 142855 - protein, 9 aa, Homo sapiens
RNRLKAKCS

SEQ ID NO: 142856 - protein, 9 aa, Homo sapiens
NRLKAKCSL

SEQ ID NO: 142857 - protein, 9 aa, Homo sapiens
RLKAKCSLC

SEQ ID NO: 142858 - protein, 9 aa, Homo sapiens
LKAKCSLCR

SEQ ID NO: 142859 - protein, 9 aa, Homo sapiens
KAKCSLCRL

SEQ ID NO: 142860 - protein, 9 aa, Homo sapiens
AKCSLCRLY

SEQ ID NO: 142861 - protein, 9 aa, Homo sapiens
KCSLCRLYA

SEQ ID NO: 142862 - protein, 9 aa, Homo sapiens
CSLCRLYAI

SEQ ID NO: 142863 - protein, 8 aa, Homo sapiens
SLCRLYAI

SEQ ID NO: 142864 - protein, 7 aa, Homo sapiens
LCRLYAI

SEQ ID NO: 142865 - protein, 9 aa, Homo sapiens
MESANASTS

SEQ ID NO: 142866 - protein, 9 aa, Homo sapiens
ESANASTSA

SEQ ID NO: 142867 - protein, 9 aa, Homo sapiens
SANASTSAT

SEQ ID NO: 142868 - protein, 9 aa, Homo sapiens
ANASTSATT

SEQ ID NO: 142869 - protein, 9 aa, Homo sapiens
NASTSATTI

SEQ ID NO: 142870 - protein, 9 aa, Homo sapiens
ASTSATTID

SEQ ID NO: 142871 - protein, 9 aa, Homo sapiens
STSATTIDQ

SEQ ID NO: 142872 - protein, 9 aa, Homo sapiens
TSATTIDQL

SEQ ID NO: 142873 - protein, 9 aa, Homo sapiens
SATTIDQLC

SEQ ID NO: 142874 - protein, 9 aa, Homo sapiens
ATTIDQLCK

SEQ ID NO: 142875 - protein, 9 aa, Homo sapiens
TTIDQLCKT

SEQ ID NO: 142876 - protein, 9 aa, Homo sapiens
TIDQLCKTF

SEQ ID NO: 142877 - protein, 9 aa, Homo sapiens
IDQLCKTFN

SEQ ID NO: 142878 - protein, 9 aa, Homo sapiens
DQLCKTFNL

SEQ ID NO: 142879 - protein, 9 aa, Homo sapiens
QLCKTFNLS

SEQ ID NO: 142880 - protein, 9 aa, Homo sapiens
LCKTFNLSM

SEQ ID NO: 142881 - protein, 9 aa, Homo sapiens
CKTFNLSMH

SEQ ID NO: 142882 - protein, 9 aa, Homo sapiens
KTFNLSMHT

SEQ ID NO: 142883 - protein, 9 aa, Homo sapiens
TFNLSMHTL

SEQ ID NO: 142884 - protein, 9 aa, Homo sapiens
FNLSMHTLQ

SEQ ID NO: 142885 - protein, 9 aa, Homo sapiens
NLSMHTLQI

SEQ ID NO: 142886 - protein, 9 aa, Homo sapiens
LSMHTLQIN

SEQ ID NO: 142887 - protein, 9 aa, Homo sapiens
SMHTLQINC

SEQ ID NO: 142888 - protein, 9 aa, Homo sapiens
MHTLQINCV

SEQ ID NO: 142889 - protein, 9 aa, Homo sapiens
HTLQINCVF

SEQ ID NO: 142890 - protein, 9 aa, Homo sapiens
TLQINCVFC

SEQ ID NO: 142891 - protein, 9 aa, Homo sapiens
LQINCVFCK

SEQ ID NO: 142892 - protein, 9 aa, Homo sapiens
QINCVFCKN

SEQ ID NO: 142893 - protein, 9 aa, Homo sapiens
INCVFCKNA

SEQ ID NO: 142894 - protein, 9 aa, Homo sapiens
NCVFCKNAL

SEQ ID NO: 142895 - protein, 9 aa, Homo sapiens
CVFCKNALT

SEQ ID NO: 142896 - protein, 9 aa, Homo sapiens
VFCKNALTT

SEQ ID NO: 142897 - protein, 9 aa, Homo sapiens
FCKNALTTA

SEQ ID NO: 142898 - protein, 9 aa, Homo sapiens
CKNALTTAE

SEQ ID NO: 142899 - protein, 9 aa, Homo sapiens
KNALTTAEI

SEQ ID NO: 142900 - protein, 9 aa, Homo sapiens
NALTTAEIY

SEQ ID NO: 142901 - protein, 9 aa, Homo sapiens
ALTTAEIYS

SEQ ID NO: 142902 - protein, 9 aa, Homo sapiens
LTTAEIYSY

SEQ ID NO: 142903 - protein, 9 aa, Homo sapiens
TTAEIYSYA

SEQ ID NO: 142904 - protein, 9 aa, Homo sapiens
TAEIYSYAY

SEQ ID NO: 142905 - protein, 9 aa, Homo sapiens
AEIYSYAYK

SEQ ID NO: 142906 - protein, 9 aa, Homo sapiens
EIYSYAYKQ

SEQ ID NO: 142907 - protein, 9 aa, Homo sapiens
IYSYAYKQL

SEQ ID NO: 142908 - protein, 9 aa, Homo sapiens
YSYAYKQLK

SEQ ID NO: 142909 - protein, 9 aa, Homo sapiens
SYAYKQLKV

SEQ ID NO: 142910 - protein, 9 aa, Homo sapiens
YAYKQLKVL

SEQ ID NO: 142911 - protein, 9 aa, Homo sapiens
AYKQLKVLF

SEQ ID NO: 142912 - protein, 9 aa, Homo sapiens
YKQLKVLFR

SEQ ID NO: 142913 - protein, 9 aa, Homo sapiens
KQLKVLFRG

SEQ ID NO: 142914 - protein, 9 aa, Homo sapiens
QLKVLFRGG

SEQ ID NO: 142915 - protein, 9 aa, Homo sapiens
LKVLFRGGY

SEQ ID NO: 142916 - protein, 9 aa, Homo sapiens
KVLFRGGYP

SEQ ID NO: 142917 - protein, 9 aa, Homo sapiens
VLFRGGYPY

SEQ ID NO: 142918 - protein, 9 aa, Homo sapiens
LFRGGYPYA

SEQ ID NO: 142919 - protein, 9 aa, Homo sapiens
FRGGYPYAA

SEQ ID NO: 142920 - protein, 9 aa, Homo sapiens
RGGYPYAAC

SEQ ID NO: 142921 - protein, 9 aa, Homo sapiens
GGYPYAACA

SEQ ID NO: 142922 - protein, 9 aa, Homo sapiens
GYPYAACAC

SEQ ID NO: 142923 - protein, 9 aa, Homo sapiens
YPYAACACC

SEQ ID NO: 142924 - protein, 9 aa, Homo sapiens
PYAACACCL

SEQ ID NO: 142925 - protein, 9 aa, Homo sapiens
YAACACCLE

SEQ ID NO: 142926 - protein, 9 aa, Homo sapiens
AACACCLEF

SEQ ID NO: 142927 - protein, 9 aa, Homo sapiens
ACACCLEFH

SEQ ID NO: 142928 - protein, 9 aa, Homo sapiens
CACCLEFHG

SEQ ID NO: 142929 - protein, 9 aa, Homo sapiens
ACCLEFHGK

SEQ ID NO: 142930 - protein, 9 aa, Homo sapiens
CCLEFHGKI

SEQ ID NO: 142931 - protein, 9 aa, Homo sapiens
CLEFHGKIN

SEQ ID NO: 142932 - protein, 9 aa, Homo sapiens
LEFHGKINQ

SEQ ID NO: 142933 - protein, 9 aa, Homo sapiens
EFHGKINQY

SEQ ID NO: 142934 - protein, 9 aa, Homo sapiens
FHGKINQYR

SEQ ID NO: 142935 - protein, 9 aa, Homo sapiens
HGKINQYRH

SEQ ID NO: 142936 - protein, 9 aa, Homo sapiens
GKINQYRHF

SEQ ID NO: 142937 - protein, 9 aa, Homo sapiens
KINQYRHFD

SEQ ID NO: 142938 - protein, 9 aa, Homo sapiens
INQYRHFDY

SEQ ID NO: 142939 - protein, 9 aa, Homo sapiens
NQYRHFDYA

SEQ ID NO: 142940 - protein, 9 aa, Homo sapiens
QYRHFDYAG

SEQ ID NO: 142941 - protein, 9 aa, Homo sapiens
YRHFDYAGY

SEQ ID NO: 142942 - protein, 9 aa, Homo sapiens
RHFDYAGYA

SEQ ID NO: 142943 - protein, 9 aa, Homo sapiens
HFDYAGYAT

SEQ ID NO: 142944 - protein, 9 aa, Homo sapiens
FDYAGYATT

SEQ ID NO: 142945 - protein, 9 aa, Homo sapiens
DYAGYATTV

SEQ ID NO: 142946 - protein, 9 aa, Homo sapiens
YAGYATTVE

SEQ ID NO: 142947 - protein, 9 aa, Homo sapiens
AGYATTVEE

SEQ ID NO: 142948 - protein, 9 aa, Homo sapiens
GYATTVEEE

SEQ ID NO: 142949 - protein, 9 aa, Homo sapiens
YATTVEEET

SEQ ID NO: 142950 - protein, 9 aa, Homo sapiens
ATTVEEETK

SEQ ID NO: 142951 - protein, 9 aa, Homo sapiens
TTVEEETKQ

SEQ ID NO: 142952 - protein, 9 aa, Homo sapiens
TVEEETKQD

SEQ ID NO: 142953 - protein, 9 aa, Homo sapiens
VEEETKQDI

SEQ ID NO: 142954 - protein, 9 aa, Homo sapiens
EEETKQDIL

SEQ ID NO: 142955 - protein, 9 aa, Homo sapiens
EETKQDILD

SEQ ID NO: 142956 - protein, 9 aa, Homo sapiens
ETKQDILDV

SEQ ID NO: 142957 - protein, 9 aa, Homo sapiens
TKQDILDVL

SEQ ID NO: 142958 - protein, 9 aa, Homo sapiens
KQDILDVLI

SEQ ID NO: 142959 - protein, 9 aa, Homo sapiens
QDILDVLIR

SEQ ID NO: 142960 - protein, 9 aa, Homo sapiens
DILDVLIRC

SEQ ID NO: 142961 - protein, 9 aa, Homo sapiens
ILDVLIRCY

SEQ ID NO: 142962 - protein, 9 aa, Homo sapiens
LDVLIRCYL

SEQ ID NO: 142963 - protein, 9 aa, Homo sapiens
DVLIRCYLC

SEQ ID NO: 142964 - protein, 9 aa, Homo sapiens
VLIRCYLCH

SEQ ID NO: 142965 - protein, 9 aa, Homo sapiens
LIRCYLCHK

SEQ ID NO: 142966 - protein, 9 aa, Homo sapiens
IRCYLCHKP

SEQ ID NO: 142967 - protein, 9 aa, Homo sapiens
RCYLCHKPL

SEQ ID NO: 142968 - protein, 9 aa, Homo sapiens
CYLCHKPLC

SEQ ID NO: 142969 - protein, 9 aa, Homo sapiens
YLCHKPLCE

SEQ ID NO: 142970 - protein, 9 aa, Homo sapiens
LCHKPLCEV

SEQ ID NO: 142971 - protein, 9 aa, Homo sapiens
CHKPLCEVE

SEQ ID NO: 142972 - protein, 9 aa, Homo sapiens
HKPLCEVEK

SEQ ID NO: 142973 - protein, 9 aa, Homo sapiens
KPLCEVEKV

SEQ ID NO: 142974 - protein, 9 aa, Homo sapiens
PLCEVEKVK

SEQ ID NO: 142975 - protein, 9 aa, Homo sapiens
LCEVEKVKH

SEQ ID NO: 142976 - protein, 9 aa, Homo sapiens
CEVEKVKHI

SEQ ID NO: 142977 - protein, 9 aa, Homo sapiens
EVEKVKHIL

SEQ ID NO: 142978 - protein, 9 aa, Homo sapiens
VEKVKHILT

SEQ ID NO: 142979 - protein, 9 aa, Homo sapiens
EKVKHILTK

SEQ ID NO: 142980 - protein, 9 aa, Homo sapiens
KVKHILTKA

SEQ ID NO: 142981 - protein, 9 aa, Homo sapiens
VKHILTKAR

SEQ ID NO: 142982 - protein, 9 aa, Homo sapiens
KHILTKARF

SEQ ID NO: 142983 - protein, 9 aa, Homo sapiens
HILTKARFI

SEQ ID NO: 142984 - protein, 9 aa, Homo sapiens
ILTKARFIK

SEQ ID NO: 142985 - protein, 9 aa, Homo sapiens
LTKARFIKL

SEQ ID NO: 142986 - protein, 9 aa, Homo sapiens
TKARFIKLN

SEQ ID NO: 142987 - protein, 9 aa, Homo sapiens
KARFIKLNC

SEQ ID NO: 142988 - protein, 9 aa, Homo sapiens
ARFIKLNCT

SEQ ID NO: 142989 - protein, 9 aa, Homo sapiens
RFIKLNCTW

SEQ ID NO: 142990 - protein, 9 aa, Homo sapiens
FIKLNCTWK

SEQ ID NO: 142991 - protein, 9 aa, Homo sapiens
IKLNCTWKG

SEQ ID NO: 142992 - protein, 9 aa, Homo sapiens
KLNCTWKGR

SEQ ID NO: 142993 - protein, 9 aa, Homo sapiens
LNCTWKGRC

SEQ ID NO: 142994 - protein, 9 aa, Homo sapiens
NCTWKGRCL

SEQ ID NO: 142995 - protein, 9 aa, Homo sapiens
CTWKGRCLH

SEQ ID NO: 142996 - protein, 9 aa, Homo sapiens
TWKGRCLHC

SEQ ID NO: 142997 - protein, 9 aa, Homo sapiens
WKGRCLHCW

SEQ ID NO: 142998 - protein, 9 aa, Homo sapiens
KGRCLHCWT

SEQ ID NO: 142999 - protein, 9 aa, Homo sapiens
GRCLHCWTT

SEQ ID NO: 143000 - protein, 9 aa, Homo sapiens
RCLHCWTTC

SEQ ID NO: 143001 - protein, 9 aa, Homo sapiens
CLHCWTTCM

SEQ ID NO: 143002 - protein, 9 aa, Homo sapiens
LHCWTTCME

SEQ ID NO: 143003 - protein, 9 aa, Homo sapiens
HCWTTCMED

SEQ ID NO: 143004 - protein, 9 aa, Homo sapiens
CWTTCMEDM

SEQ ID NO: 143005 - protein, 9 aa, Homo sapiens
WTTCMEDML

SEQ ID NO: 143006 - protein, 9 aa, Homo sapiens
TTCMEDMLP

SEQ ID NO: 143007 - protein, 9 aa, Homo sapiens
MHQKRTAMF

SEQ ID NO: 143008 - protein, 9 aa, Homo sapiens
HQKRTAMFQ

SEQ ID NO: 143009 - protein, 9 aa, Homo sapiens
QKRTAMFQD

SEQ ID NO: 143010 - protein, 9 aa, Homo sapiens
KRTAMFQDP

SEQ ID NO: 143011 - protein, 9 aa, Homo sapiens
RTAMFQDPQ

SEQ ID NO: 143012 - protein, 9 aa, Homo sapiens
TAMFQDPQE

SEQ ID NO: 143013 - protein, 9 aa, Homo sapiens
AMFQDPQER

SEQ ID NO: 143014 - protein, 9 aa, Homo sapiens
MFQDPQERP

SEQ ID NO: 143015 - protein, 9 aa, Homo sapiens
FQDPQERPR

SEQ ID NO: 143016 - protein, 9 aa, Homo sapiens
QDPQERPRK

SEQ ID NO: 143017 - protein, 9 aa, Homo sapiens
DPQERPRKL

SEQ ID NO: 143018 - protein, 9 aa, Homo sapiens
PQERPRKLP

SEQ ID NO: 143019 - protein, 9 aa, Homo sapiens
QERPRKLPQ

SEQ ID NO: 143020 - protein, 9 aa, Homo sapiens
ERPRKLPQL

SEQ ID NO: 143021 - protein, 9 aa, Homo sapiens
RPRKLPQLC

SEQ ID NO: 143022 - protein, 9 aa, Homo sapiens
PRKLPQLCT

SEQ ID NO: 143023 - protein, 9 aa, Homo sapiens
RKLPQLCTE

SEQ ID NO: 143024 - protein, 9 aa, Homo sapiens
KLPQLCTEL

SEQ ID NO: 143025 - protein, 9 aa, Homo sapiens
LPQLCTELQ

SEQ ID NO: 143026 - protein, 9 aa, Homo sapiens
PQLCTELQT

SEQ ID NO: 143027 - protein, 9 aa, Homo sapiens
QLCTELQTT

SEQ ID NO: 143028 - protein, 9 aa, Homo sapiens
LCTELQTTI

SEQ ID NO: 143029 - protein, 9 aa, Homo sapiens
CTELQTTIH

SEQ ID NO: 143030 - protein, 9 aa, Homo sapiens
TELQTTIHE

SEQ ID NO: 143031 - protein, 9 aa, Homo sapiens
ELQTTIHEI

SEQ ID NO: 143032 - protein, 9 aa, Homo sapiens
LQTTIHEII

SEQ ID NO: 143033 - protein, 9 aa, Homo sapiens
QTTIHEIIL

SEQ ID NO: 143034 - protein, 9 aa, Homo sapiens
TTIHEIILE

SEQ ID NO: 143035 - protein, 9 aa, Homo sapiens
TIHEIILEC

SEQ ID NO: 143036 - protein, 9 aa, Homo sapiens
IHEIILECV

SEQ ID NO: 143037 - protein, 9 aa, Homo sapiens
HEIILECVY

SEQ ID NO: 143038 - protein, 9 aa, Homo sapiens
EIILECVYC

SEQ ID NO: 143039 - protein, 9 aa, Homo sapiens
IILECVYCK

SEQ ID NO: 143040 - protein, 9 aa, Homo sapiens
ILECVYCKQ

SEQ ID NO: 143041 - protein, 9 aa, Homo sapiens
LECVYCKQQ

SEQ ID NO: 143042 - protein, 9 aa, Homo sapiens
ECVYCKQQL

SEQ ID NO: 143043 - protein, 9 aa, Homo sapiens
CVYCKQQLL

SEQ ID NO: 143044 - protein, 9 aa, Homo sapiens
VYCKQQLLR

SEQ ID NO: 143045 - protein, 9 aa, Homo sapiens
YCKQQLLRR

SEQ ID NO: 143046 - protein, 9 aa, Homo sapiens
CKQQLLRRE

SEQ ID NO: 143047 - protein, 9 aa, Homo sapiens
KQQLLRREV

SEQ ID NO: 143048 - protein, 9 aa, Homo sapiens
QQLLRREVY

SEQ ID NO: 143049 - protein, 9 aa, Homo sapiens
QLLRREVYD

SEQ ID NO: 143050 - protein, 9 aa, Homo sapiens
LLRREVYDF

SEQ ID NO: 143051 - protein, 9 aa, Homo sapiens
LRREVYDFA

SEQ ID NO: 143052 - protein, 9 aa, Homo sapiens
RREVYDFAF

SEQ ID NO: 143053 - protein, 9 aa, Homo sapiens
REVYDFAFR

SEQ ID NO: 143054 - protein, 9 aa, Homo sapiens
EVYDFAFRD

SEQ ID NO: 143055 - protein, 9 aa, Homo sapiens
VYDFAFRDL

SEQ ID NO: 143056 - protein, 9 aa, Homo sapiens
YDFAFRDLC

SEQ ID NO: 143057 - protein, 9 aa, Homo sapiens
DFAFRDLCI

SEQ ID NO: 143058 - protein, 9 aa, Homo sapiens
FAFRDLCIV

SEQ ID NO: 143059 - protein, 9 aa, Homo sapiens
AFRDLCIVY

SEQ ID NO: 143060 - protein, 9 aa, Homo sapiens
FRDLCIVYR

SEQ ID NO: 143061 - protein, 9 aa, Homo sapiens
RDLCIVYRD

SEQ ID NO: 143062 - protein, 9 aa, Homo sapiens
DLCIVYRDG

SEQ ID NO: 143063 - protein, 9 aa, Homo sapiens
LCIVYRDGN

SEQ ID NO: 143064 - protein, 9 aa, Homo sapiens
CIVYRDGNP

SEQ ID NO: 143065 - protein, 9 aa, Homo sapiens
IVYRDGNPY

SEQ ID NO: 143066 - protein, 9 aa, Homo sapiens
VYRDGNPYA

SEQ ID NO: 143067 - protein, 9 aa, Homo sapiens
YRDGNPYAV

SEQ ID NO: 143068 - protein, 9 aa, Homo sapiens
RDGNPYAVC

SEQ ID NO: 143069 - protein, 9 aa, Homo sapiens
DGNPYAVCD

SEQ ID NO: 143070 - protein, 9 aa, Homo sapiens
GNPYAVCDK

SEQ ID NO: 143071 - protein, 9 aa, Homo sapiens
NPYAVCDKC

SEQ ID NO: 143072 - protein, 9 aa, Homo sapiens
PYAVCDKCL

SEQ ID NO: 143073 - protein, 9 aa, Homo sapiens
YAVCDKCLK

SEQ ID NO: 143074 - protein, 9 aa, Homo sapiens
AVCDKCLKF

SEQ ID NO: 143075 - protein, 9 aa, Homo sapiens
VCDKCLKFY

SEQ ID NO: 143076 - protein, 9 aa, Homo sapiens
CDKCLKFYS

SEQ ID NO: 143077 - protein, 9 aa, Homo sapiens
DKCLKFYSK

SEQ ID NO: 143078 - protein, 9 aa, Homo sapiens
KCLKFYSKI

SEQ ID NO: 143079 - protein, 9 aa, Homo sapiens
CLKFYSKIS

SEQ ID NO: 143080 - protein, 9 aa, Homo sapiens
LKFYSKISE

SEQ ID NO: 143081 - protein, 9 aa, Homo sapiens
KFYSKISEY

SEQ ID NO: 143082 - protein, 9 aa, Homo sapiens
FYSKISEYR

SEQ ID NO: 143083 - protein, 9 aa, Homo sapiens
YSKISEYRH

SEQ ID NO: 143084 - protein, 9 aa, Homo sapiens
SKISEYRHY

SEQ ID NO: 143085 - protein, 9 aa, Homo sapiens
KISEYRHYC

SEQ ID NO: 143086 - protein, 9 aa, Homo sapiens
ISEYRHYCY

SEQ ID NO: 143087 - protein, 9 aa, Homo sapiens
SEYRHYCYS

SEQ ID NO: 143088 - protein, 9 aa, Homo sapiens
EYRHYCYSL

SEQ ID NO: 143089 - protein, 9 aa, Homo sapiens
YRHYCYSLY

SEQ ID NO: 143090 - protein, 9 aa, Homo sapiens
RHYCYSLYG

SEQ ID NO: 143091 - protein, 9 aa, Homo sapiens
HYCYSLYGT

SEQ ID NO: 143092 - protein, 9 aa, Homo sapiens
YCYSLYGTT

SEQ ID NO: 143093 - protein, 9 aa, Homo sapiens
CYSLYGTTL

SEQ ID NO: 143094 - protein, 9 aa, Homo sapiens
YSLYGTTLE

SEQ ID NO: 143095 - protein, 9 aa, Homo sapiens
SLYGTTLEQ

SEQ ID NO: 143096 - protein, 9 aa, Homo sapiens
LYGTTLEQQ

SEQ ID NO: 143097 - protein, 9 aa, Homo sapiens
YGTTLEQQY

SEQ ID NO: 143098 - protein, 9 aa, Homo sapiens
GTTLEQQYN

SEQ ID NO: 143099 - protein, 9 aa, Homo sapiens
TTLEQQYNK

SEQ ID NO: 143100 - protein, 9 aa, Homo sapiens
TLEQQYNKP

SEQ ID NO: 143101 - protein, 9 aa, Homo sapiens
LEQQYNKPL

SEQ ID NO: 143102 - protein, 9 aa, Homo sapiens
EQQYNKPLC

SEQ ID NO: 143103 - protein, 9 aa, Homo sapiens
QQYNKPLCD

SEQ ID NO: 143104 - protein, 9 aa, Homo sapiens
QYNKPLCDL

SEQ ID NO: 143105 - protein, 9 aa, Homo sapiens
YNKPLCDLL

SEQ ID NO: 143106 - protein, 9 aa, Homo sapiens
NKPLCDLLI

SEQ ID NO: 143107 - protein, 9 aa, Homo sapiens
KPLCDLLIR

SEQ ID NO: 143108 - protein, 9 aa, Homo sapiens
PLCDLLIRC

SEQ ID NO: 143109 - protein, 9 aa, Homo sapiens
LCDLLIRCI

SEQ ID NO: 143110 - protein, 9 aa, Homo sapiens
CDLLIRCIN

SEQ ID NO: 143111 - protein, 9 aa, Homo sapiens
DLLIRCINC

SEQ ID NO: 143112 - protein, 9 aa, Homo sapiens
LLIRCINCQ

SEQ ID NO: 143113 - protein, 9 aa, Homo sapiens
LIRCINCQK

SEQ ID NO: 143114 - protein, 9 aa, Homo sapiens
IRCINCQKP

SEQ ID NO: 143115 - protein, 9 aa, Homo sapiens
RCINCQKPL

SEQ ID NO: 143116 - protein, 9 aa, Homo sapiens
CINCQKPLC

SEQ ID NO: 143117 - protein, 9 aa, Homo sapiens
INCQKPLCP

SEQ ID NO: 143118 - protein, 9 aa, Homo sapiens
NCQKPLCPE

SEQ ID NO: 143119 - protein, 9 aa, Homo sapiens
CQKPLCPEE

SEQ ID NO: 143120 - protein, 9 aa, Homo sapiens
QKPLCPEEK

SEQ ID NO: 143121 - protein, 9 aa, Homo sapiens
KPLCPEEKQ

SEQ ID NO: 143122 - protein, 9 aa, Homo sapiens
PLCPEEKQR

SEQ ID NO: 143123 - protein, 9 aa, Homo sapiens
LCPEEKQRH

SEQ ID NO: 143124 - protein, 9 aa, Homo sapiens
CPEEKQRHL

SEQ ID NO: 143125 - protein, 9 aa, Homo sapiens
PEEKQRHLD

SEQ ID NO: 143126 - protein, 9 aa, Homo sapiens
EEKQRHLDK

SEQ ID NO: 143127 - protein, 9 aa, Homo sapiens
EKQRHLDKK

SEQ ID NO: 143128 - protein, 9 aa, Homo sapiens
KQRHLDKKH

SEQ ID NO: 143129 - protein, 9 aa, Homo sapiens
QRHLDKKHR

SEQ ID NO: 143130 - protein, 9 aa, Homo sapiens
RHLDKKHRF

SEQ ID NO: 143131 - protein, 9 aa, Homo sapiens
HLDKKHRFH

SEQ ID NO: 143132 - protein, 9 aa, Homo sapiens
LDKKHRFHN

SEQ ID NO: 143133 - protein, 9 aa, Homo sapiens
DKKHRFHNI

SEQ ID NO: 143134 - protein, 9 aa, Homo sapiens
KKHRFHNIR

SEQ ID NO: 143135 - protein, 9 aa, Homo sapiens
KHRFHNIRG

SEQ ID NO: 143136 - protein, 9 aa, Homo sapiens
HRFHNIRGR

SEQ ID NO: 143137 - protein, 9 aa, Homo sapiens
RFHNIRGRW

SEQ ID NO: 143138 - protein, 9 aa, Homo sapiens
FHNIRGRWT

SEQ ID NO: 143139 - protein, 9 aa, Homo sapiens
HNIRGRWTG

SEQ ID NO: 143140 - protein, 9 aa, Homo sapiens
NIRGRWTGR

SEQ ID NO: 143141 - protein, 9 aa, Homo sapiens
IRGRWTGRC

SEQ ID NO: 143142 - protein, 9 aa, Homo sapiens
RGRWTGRCM

SEQ ID NO: 143143 - protein, 9 aa, Homo sapiens
GRWTGRCMS

SEQ ID NO: 143144 - protein, 9 aa, Homo sapiens
RWTGRCMSC

SEQ ID NO: 143145 - protein, 9 aa, Homo sapiens
WTGRCMSCC

SEQ ID NO: 143146 - protein, 9 aa, Homo sapiens
TGRCMSCCR

SEQ ID NO: 143147 - protein, 9 aa, Homo sapiens
GRCMSCCRS

SEQ ID NO: 143148 - protein, 9 aa, Homo sapiens
RCMSCCRSS

SEQ ID NO: 143149 - protein, 9 aa, Homo sapiens
CMSCCRSSR

SEQ ID NO: 143150 - protein, 9 aa, Homo sapiens
MSCCRSSRT

SEQ ID NO: 143151 - protein, 9 aa, Homo sapiens
SCCRSSRTR

SEQ ID NO: 143152 - protein, 9 aa, Homo sapiens
CCRSSRTRR

SEQ ID NO: 143153 - protein, 9 aa, Homo sapiens
CRSSRTRRE

SEQ ID NO: 143154 - protein, 9 aa, Homo sapiens
RSSRTRRET

SEQ ID NO: 143155 - protein, 9 aa, Homo sapiens
SSRTRRETQ

SEQ ID NO: 143156 - protein, 9 aa, Homo sapiens
SRTRRETQL

SEQ ID NO: 143157 - protein, 8 aa, Homo sapiens
RTRRETQL

SEQ ID NO: 143158 - protein, 7 aa, Homo sapiens
TRRETQL

SEQ ID NO: 143159 - protein, 9 aa, Homo sapiens
MARFEDPTR

SEQ ID NO: 143160 - protein, 9 aa, Homo sapiens
ARFEDPTRR

SEQ ID NO: 143161 - protein, 9 aa, Homo sapiens
RFEDPTRRP

SEQ ID NO: 143162 - protein, 9 aa, Homo sapiens
FEDPTRRPY

SEQ ID NO: 143163 - protein, 9 aa, Homo sapiens
EDPTRRPYK

SEQ ID NO: 143164 - protein, 9 aa, Homo sapiens
DPTRRPYKL

SEQ ID NO: 143165 - protein, 9 aa, Homo sapiens
PTRRPYKLP

SEQ ID NO: 143166 - protein, 9 aa, Homo sapiens
TRRPYKLPD

SEQ ID NO: 143167 - protein, 9 aa, Homo sapiens
RRPYKLPDL

SEQ ID NO: 143168 - protein, 9 aa, Homo sapiens
RPYKLPDLC

SEQ ID NO: 143169 - protein, 9 aa, Homo sapiens
PYKLPDLCT

SEQ ID NO: 143170 - protein, 9 aa, Homo sapiens
YKLPDLCTE

SEQ ID NO: 143171 - protein, 9 aa, Homo sapiens
KLPDLCTEL

SEQ ID NO: 143172 - protein, 9 aa, Homo sapiens
LPDLCTELN

SEQ ID NO: 143173 - protein, 9 aa, Homo sapiens
PDLCTELNT

SEQ ID NO: 143174 - protein, 9 aa, Homo sapiens
DLCTELNTS

SEQ ID NO: 143175 - protein, 9 aa, Homo sapiens
LCTELNTSL

SEQ ID NO: 143176 - protein, 9 aa, Homo sapiens
CTELNTSLQ

SEQ ID NO: 143177 - protein, 9 aa, Homo sapiens
TELNTSLQD

SEQ ID NO: 143178 - protein, 9 aa, Homo sapiens
ELNTSLQDI

SEQ ID NO: 143179 - protein, 9 aa, Homo sapiens
LNTSLQDIE

SEQ ID NO: 143180 - protein, 9 aa, Homo sapiens
NTSLQDIEI

SEQ ID NO: 143181 - protein, 9 aa, Homo sapiens
TSLQDIEIT

SEQ ID NO: 143182 - protein, 9 aa, Homo sapiens
SLQDIEITC

SEQ ID NO: 143183 - protein, 9 aa, Homo sapiens
LQDIEITCV

SEQ ID NO: 143184 - protein, 9 aa, Homo sapiens
QDIEITCVY

SEQ ID NO: 143185 - protein, 9 aa, Homo sapiens
DIEITCVYC

SEQ ID NO: 143186 - protein, 9 aa, Homo sapiens
IEITCVYCK

SEQ ID NO: 143187 - protein, 9 aa, Homo sapiens
EITCVYCKT

SEQ ID NO: 143188 - protein, 9 aa, Homo sapiens
ITCVYCKTV

SEQ ID NO: 143189 - protein, 9 aa, Homo sapiens
TCVYCKTVL

SEQ ID NO: 143190 - protein, 9 aa, Homo sapiens
CVYCKTVLE

SEQ ID NO: 143191 - protein, 9 aa, Homo sapiens
VYCKTVLEL

SEQ ID NO: 143192 - protein, 9 aa, Homo sapiens
YCKTVLELT

SEQ ID NO: 143193 - protein, 9 aa, Homo sapiens
CKTVLELTE

SEQ ID NO: 143194 - protein, 9 aa, Homo sapiens
KTVLELTEV

SEQ ID NO: 143195 - protein, 9 aa, Homo sapiens
TVLELTEVF

SEQ ID NO: 143196 - protein, 9 aa, Homo sapiens
VLELTEVFE

SEQ ID NO: 143197 - protein, 9 aa, Homo sapiens
LELTEVFEF

SEQ ID NO: 143198 - protein, 9 aa, Homo sapiens
ELTEVFEFA

SEQ ID NO: 143199 - protein, 9 aa, Homo sapiens
LTEVFEFAF

SEQ ID NO: 143200 - protein, 9 aa, Homo sapiens
TEVFEFAFK

SEQ ID NO: 143201 - protein, 9 aa, Homo sapiens
EVFEFAFKD

SEQ ID NO: 143202 - protein, 9 aa, Homo sapiens
VFEFAFKDL

SEQ ID NO: 143203 - protein, 9 aa, Homo sapiens
FEFAFKDLF

SEQ ID NO: 143204 - protein, 9 aa, Homo sapiens
EFAFKDLFV

SEQ ID NO: 143205 - protein, 9 aa, Homo sapiens
FAFKDLFVV

SEQ ID NO: 143206 - protein, 9 aa, Homo sapiens
AFKDLFVVY

SEQ ID NO: 143207 - protein, 9 aa, Homo sapiens
FKDLFVVYR

SEQ ID NO: 143208 - protein, 9 aa, Homo sapiens
KDLFVVYRD

SEQ ID NO: 143209 - protein, 9 aa, Homo sapiens
DLFVVYRDS

SEQ ID NO: 143210 - protein, 9 aa, Homo sapiens
LFVVYRDSI

SEQ ID NO: 143211 - protein, 9 aa, Homo sapiens
FVVYRDSIP

SEQ ID NO: 143212 - protein, 9 aa, Homo sapiens
VVYRDSIPH

SEQ ID NO: 143213 - protein, 9 aa, Homo sapiens
VYRDSIPHA

SEQ ID NO: 143214 - protein, 9 aa, Homo sapiens
YRDSIPHAA

SEQ ID NO: 143215 - protein, 9 aa, Homo sapiens
RDSIPHAAC

SEQ ID NO: 143216 - protein, 9 aa, Homo sapiens
DSIPHAACH

SEQ ID NO: 143217 - protein, 9 aa, Homo sapiens
SIPHAACHK

SEQ ID NO: 143218 - protein, 9 aa, Homo sapiens
IPHAACHKC

SEQ ID NO: 143219 - protein, 9 aa, Homo sapiens
PHAACHKCI

SEQ ID NO: 143220 - protein, 9 aa, Homo sapiens
HAACHKCID

SEQ ID NO: 143221 - protein, 9 aa, Homo sapiens
AACHKCIDF

SEQ ID NO: 143222 - protein, 9 aa, Homo sapiens
ACHKCIDFY

SEQ ID NO: 143223 - protein, 9 aa, Homo sapiens
CHKCIDFYS

SEQ ID NO: 143224 - protein, 9 aa, Homo sapiens
HKCIDFYSR

SEQ ID NO: 143225 - protein, 9 aa, Homo sapiens
KCIDFYSRI

SEQ ID NO: 143226 - protein, 9 aa, Homo sapiens
CIDFYSRIR

SEQ ID NO: 143227 - protein, 9 aa, Homo sapiens
IDFYSRIRE

SEQ ID NO: 143228 - protein, 9 aa, Homo sapiens
DFYSRIREL

SEQ ID NO: 143229 - protein, 9 aa, Homo sapiens
FYSRIRELR

SEQ ID NO: 143230 - protein, 9 aa, Homo sapiens
YSRIRELRH

SEQ ID NO: 143231 - protein, 9 aa, Homo sapiens
SRIRELRHY

SEQ ID NO: 143232 - protein, 9 aa, Homo sapiens
RIRELRHYS

SEQ ID NO: 143233 - protein, 9 aa, Homo sapiens
IRELRHYSD

SEQ ID NO: 143234 - protein, 9 aa, Homo sapiens
RELRHYSDS

SEQ ID NO: 143235 - protein, 9 aa, Homo sapiens
ELRHYSDSV

SEQ ID NO: 143236 - protein, 9 aa, Homo sapiens
LRHYSDSVY

SEQ ID NO: 143237 - protein, 9 aa, Homo sapiens
RHYSDSVYG

SEQ ID NO: 143238 - protein, 9 aa, Homo sapiens
HYSDSVYGD

SEQ ID NO: 143239 - protein, 9 aa, Homo sapiens
YSDSVYGDT

SEQ ID NO: 143240 - protein, 9 aa, Homo sapiens
SDSVYGDTL

SEQ ID NO: 143241 - protein, 9 aa, Homo sapiens
DSVYGDTLE

SEQ ID NO: 143242 - protein, 9 aa, Homo sapiens
SVYGDTLEK

SEQ ID NO: 143243 - protein, 9 aa, Homo sapiens
VYGDTLEKL

SEQ ID NO: 143244 - protein, 9 aa, Homo sapiens
YGDTLEKLT

SEQ ID NO: 143245 - protein, 9 aa, Homo sapiens
GDTLEKLTN

SEQ ID NO: 143246 - protein, 9 aa, Homo sapiens
DTLEKLTNT

SEQ ID NO: 143247 - protein, 9 aa, Homo sapiens
TLEKLTNTG

SEQ ID NO: 143248 - protein, 9 aa, Homo sapiens
LEKLTNTGL

SEQ ID NO: 143249 - protein, 9 aa, Homo sapiens
EKLTNTGLY

SEQ ID NO: 143250 - protein, 9 aa, Homo sapiens
KLTNTGLYN

SEQ ID NO: 143251 - protein, 9 aa, Homo sapiens
LTNTGLYNL

SEQ ID NO: 143252 - protein, 9 aa, Homo sapiens
TNTGLYNLL

SEQ ID NO: 143253 - protein, 9 aa, Homo sapiens
NTGLYNLLI

SEQ ID NO: 143254 - protein, 9 aa, Homo sapiens
TGLYNLLIR

SEQ ID NO: 143255 - protein, 9 aa, Homo sapiens
GLYNLLIRC

SEQ ID NO: 143256 - protein, 9 aa, Homo sapiens
LYNLLIRCL

SEQ ID NO: 143257 - protein, 9 aa, Homo sapiens
YNLLIRCLR

SEQ ID NO: 143258 - protein, 9 aa, Homo sapiens
NLLIRCLRC

SEQ ID NO: 143259 - protein, 9 aa, Homo sapiens
LLIRCLRCQ

SEQ ID NO: 143260 - protein, 9 aa, Homo sapiens
LIRCLRCQK

SEQ ID NO: 143261 - protein, 9 aa, Homo sapiens
IRCLRCQKP

SEQ ID NO: 143262 - protein, 9 aa, Homo sapiens
RCLRCQKPL

SEQ ID NO: 143263 - protein, 9 aa, Homo sapiens
CLRCQKPLN

SEQ ID NO: 143264 - protein, 9 aa, Homo sapiens
LRCQKPLNP

SEQ ID NO: 143265 - protein, 9 aa, Homo sapiens
RCQKPLNPA

SEQ ID NO: 143266 - protein, 9 aa, Homo sapiens
CQKPLNPAE

SEQ ID NO: 143267 - protein, 9 aa, Homo sapiens
QKPLNPAEK

SEQ ID NO: 143268 - protein, 9 aa, Homo sapiens
KPLNPAEKL

SEQ ID NO: 143269 - protein, 9 aa, Homo sapiens
PLNPAEKLR

SEQ ID NO: 143270 - protein, 9 aa, Homo sapiens
LNPAEKLRH

SEQ ID NO: 143271 - protein, 9 aa, Homo sapiens
NPAEKLRHL

SEQ ID NO: 143272 - protein, 9 aa, Homo sapiens
PAEKLRHLN

SEQ ID NO: 143273 - protein, 9 aa, Homo sapiens
AEKLRHLNE

SEQ ID NO: 143274 - protein, 9 aa, Homo sapiens
EKLRHLNEK

SEQ ID NO: 143275 - protein, 9 aa, Homo sapiens
KLRHLNEKR

SEQ ID NO: 143276 - protein, 9 aa, Homo sapiens
LRHLNEKRR

SEQ ID NO: 143277 - protein, 9 aa, Homo sapiens
RHLNEKRRF

SEQ ID NO: 143278 - protein, 9 aa, Homo sapiens
HLNEKRRFH

SEQ ID NO: 143279 - protein, 9 aa, Homo sapiens
LNEKRRFHK

SEQ ID NO: 143280 - protein, 9 aa, Homo sapiens
NEKRRFHKI

SEQ ID NO: 143281 - protein, 9 aa, Homo sapiens
EKRRFHKIA

SEQ ID NO: 143282 - protein, 9 aa, Homo sapiens
KRRFHKIAG

SEQ ID NO: 143283 - protein, 9 aa, Homo sapiens
RRFHKIAGH

SEQ ID NO: 143284 - protein, 9 aa, Homo sapiens
RFHKIAGHY

SEQ ID NO: 143285 - protein, 9 aa, Homo sapiens
FHKIAGHYR

SEQ ID NO: 143286 - protein, 9 aa, Homo sapiens
HKIAGHYRG

SEQ ID NO: 143287 - protein, 9 aa, Homo sapiens
KIAGHYRGQ

SEQ ID NO: 143288 - protein, 9 aa, Homo sapiens
IAGHYRGQC

SEQ ID NO: 143289 - protein, 9 aa, Homo sapiens
AGHYRGQCH

SEQ ID NO: 143290 - protein, 9 aa, Homo sapiens
GHYRGQCHS

SEQ ID NO: 143291 - protein, 9 aa, Homo sapiens
HYRGQCHSC

SEQ ID NO: 143292 - protein, 9 aa, Homo sapiens
YRGQCHSCC

SEQ ID NO: 143293 - protein, 9 aa, Homo sapiens
RGQCHSCCN

SEQ ID NO: 143294 - protein, 9 aa, Homo sapiens
GQCHSCCNR

SEQ ID NO: 143295 - protein, 9 aa, Homo sapiens
QCHSCCNRA

SEQ ID NO: 143296 - protein, 9 aa, Homo sapiens
CHSCCNRAR

SEQ ID NO: 143297 - protein, 9 aa, Homo sapiens
HSCCNRARQ

SEQ ID NO: 143298 - protein, 9 aa, Homo sapiens
SCCNRARQE

SEQ ID NO: 143299 - protein, 9 aa, Homo sapiens
CCNRARQER

SEQ ID NO: 143300 - protein, 9 aa, Homo sapiens
CNRARQERL

SEQ ID NO: 143301 - protein, 9 aa, Homo sapiens
NRARQERLQ

SEQ ID NO: 143302 - protein, 9 aa, Homo sapiens
RARQERLQR

SEQ ID NO: 143303 - protein, 9 aa, Homo sapiens
ARQERLQRR

SEQ ID NO: 143304 - protein, 9 aa, Homo sapiens
RQERLQRRR

SEQ ID NO: 143305 - protein, 9 aa, Homo sapiens
QERLQRRRE

SEQ ID NO: 143306 - protein, 9 aa, Homo sapiens
ERLQRRRET

SEQ ID NO: 143307 - protein, 9 aa, Homo sapiens
RLQRRRETQ

SEQ ID NO: 143308 - protein, 9 aa, Homo sapiens
LQRRRETQV

SEQ ID NO: 143309 - protein, 8 aa, Homo sapiens
QRRRETQV

SEQ ID NO: 143310 - protein, 7 aa, Homo sapiens
RRRETQV

SEQ ID NO: 143311 - protein, 9 aa, Homo sapiens
MFKNPAERP

SEQ ID NO: 143312 - protein, 9 aa, Homo sapiens
FKNPAERPR

SEQ ID NO: 143313 - protein, 9 aa, Homo sapiens
KNPAERPRK

SEQ ID NO: 143314 - protein, 9 aa, Homo sapiens
NPAERPRKL

SEQ ID NO: 143315 - protein, 9 aa, Homo sapiens
PAERPRKLH

SEQ ID NO: 143316 - protein, 9 aa, Homo sapiens
AERPRKLHE

SEQ ID NO: 143317 - protein, 9 aa, Homo sapiens
ERPRKLHEL

SEQ ID NO: 143318 - protein, 9 aa, Homo sapiens
RPRKLHELS

SEQ ID NO: 143319 - protein, 9 aa, Homo sapiens
PRKLHELSS

SEQ ID NO: 143320 - protein, 9 aa, Homo sapiens
RKLHELSSA

SEQ ID NO: 143321 - protein, 9 aa, Homo sapiens
KLHELSSAL

SEQ ID NO: 143322 - protein, 9 aa, Homo sapiens
LHELSSALE

SEQ ID NO: 143323 - protein, 9 aa, Homo sapiens
HELSSALEI

SEQ ID NO: 143324 - protein, 9 aa, Homo sapiens
ELSSALEIP

SEQ ID NO: 143325 - protein, 9 aa, Homo sapiens
LSSALEIPY

SEQ ID NO: 143326 - protein, 9 aa, Homo sapiens
SSALEIPYD

SEQ ID NO: 143327 - protein, 9 aa, Homo sapiens
SALEIPYDE

SEQ ID NO: 143328 - protein, 9 aa, Homo sapiens
ALEIPYDEL

SEQ ID NO: 143329 - protein, 9 aa, Homo sapiens
LEIPYDELR

SEQ ID NO: 143330 - protein, 9 aa, Homo sapiens
EIPYDELRL

SEQ ID NO: 143331 - protein, 9 aa, Homo sapiens
IPYDELRLN

SEQ ID NO: 143332 - protein, 9 aa, Homo sapiens
PYDELRLNC

SEQ ID NO: 143333 - protein, 9 aa, Homo sapiens
YDELRLNCV

SEQ ID NO: 143334 - protein, 9 aa, Homo sapiens
DELRLNCVY

SEQ ID NO: 143335 - protein, 9 aa, Homo sapiens
ELRLNCVYC

SEQ ID NO: 143336 - protein, 9 aa, Homo sapiens
LRLNCVYCK

SEQ ID NO: 143337 - protein, 9 aa, Homo sapiens
RLNCVYCKG

SEQ ID NO: 143338 - protein, 9 aa, Homo sapiens
LNCVYCKGQ

SEQ ID NO: 143339 - protein, 9 aa, Homo sapiens
NCVYCKGQL

SEQ ID NO: 143340 - protein, 9 aa, Homo sapiens
CVYCKGQLT

SEQ ID NO: 143341 - protein, 9 aa, Homo sapiens
VYCKGQLTE

SEQ ID NO: 143342 - protein, 9 aa, Homo sapiens
YCKGQLTET

SEQ ID NO: 143343 - protein, 9 aa, Homo sapiens
CKGQLTETE

SEQ ID NO: 143344 - protein, 9 aa, Homo sapiens
KGQLTETEV

SEQ ID NO: 143345 - protein, 9 aa, Homo sapiens
GQLTETEVL

SEQ ID NO: 143346 - protein, 9 aa, Homo sapiens
QLTETEVLD

SEQ ID NO: 143347 - protein, 9 aa, Homo sapiens
LTETEVLDF

SEQ ID NO: 143348 - protein, 9 aa, Homo sapiens
TETEVLDFA

SEQ ID NO: 143349 - protein, 9 aa, Homo sapiens
ETEVLDFAF

SEQ ID NO: 143350 - protein, 9 aa, Homo sapiens
TEVLDFAFT

SEQ ID NO: 143351 - protein, 9 aa, Homo sapiens
EVLDFAFTD

SEQ ID NO: 143352 - protein, 9 aa, Homo sapiens
VLDFAFTDL

SEQ ID NO: 143353 - protein, 9 aa, Homo sapiens
LDFAFTDLT

SEQ ID NO: 143354 - protein, 9 aa, Homo sapiens
DFAFTDLTI

SEQ ID NO: 143355 - protein, 9 aa, Homo sapiens
FAFTDLTIV

SEQ ID NO: 143356 - protein, 9 aa, Homo sapiens
AFTDLTIVY

SEQ ID NO: 143357 - protein, 9 aa, Homo sapiens
FTDLTIVYR

SEQ ID NO: 143358 - protein, 9 aa, Homo sapiens
TDLTIVYRD

SEQ ID NO: 143359 - protein, 9 aa, Homo sapiens
DLTIVYRDD

SEQ ID NO: 143360 - protein, 9 aa, Homo sapiens
LTIVYRDDT

SEQ ID NO: 143361 - protein, 9 aa, Homo sapiens
TIVYRDDTP

SEQ ID NO: 143362 - protein, 9 aa, Homo sapiens
IVYRDDTPY

SEQ ID NO: 143363 - protein, 9 aa, Homo sapiens
VYRDDTPYG

SEQ ID NO: 143364 - protein, 9 aa, Homo sapiens
YRDDTPYGV

SEQ ID NO: 143365 - protein, 9 aa, Homo sapiens
RDDTPYGVC

SEQ ID NO: 143366 - protein, 9 aa, Homo sapiens
DDTPYGVCT

SEQ ID NO: 143367 - protein, 9 aa, Homo sapiens
DTPYGVCTK

SEQ ID NO: 143368 - protein, 9 aa, Homo sapiens
TPYGVCTKC

SEQ ID NO: 143369 - protein, 9 aa, Homo sapiens
PYGVCTKCL

SEQ ID NO: 143370 - protein, 9 aa, Homo sapiens
YGVCTKCLR

SEQ ID NO: 143371 - protein, 9 aa, Homo sapiens
GVCTKCLRF

SEQ ID NO: 143372 - protein, 9 aa, Homo sapiens
VCTKCLRFY

SEQ ID NO: 143373 - protein, 9 aa, Homo sapiens
CTKCLRFYS

SEQ ID NO: 143374 - protein, 9 aa, Homo sapiens
TKCLRFYSK

SEQ ID NO: 143375 - protein, 9 aa, Homo sapiens
KCLRFYSKV

SEQ ID NO: 143376 - protein, 9 aa, Homo sapiens
CLRFYSKVS

SEQ ID NO: 143377 - protein, 9 aa, Homo sapiens
LRFYSKVSE

SEQ ID NO: 143378 - protein, 9 aa, Homo sapiens
RFYSKVSEF

SEQ ID NO: 143379 - protein, 9 aa, Homo sapiens
FYSKVSEFR

SEQ ID NO: 143380 - protein, 9 aa, Homo sapiens
YSKVSEFRW

SEQ ID NO: 143381 - protein, 9 aa, Homo sapiens
SKVSEFRWY

SEQ ID NO: 143382 - protein, 9 aa, Homo sapiens
KVSEFRWYR

SEQ ID NO: 143383 - protein, 9 aa, Homo sapiens
VSEFRWYRY

SEQ ID NO: 143384 - protein, 9 aa, Homo sapiens
SEFRWYRYS

SEQ ID NO: 143385 - protein, 9 aa, Homo sapiens
EFRWYRYSV

SEQ ID NO: 143386 - protein, 9 aa, Homo sapiens
FRWYRYSVY

SEQ ID NO: 143387 - protein, 9 aa, Homo sapiens
RWYRYSVYG

SEQ ID NO: 143388 - protein, 9 aa, Homo sapiens
WYRYSVYGT

SEQ ID NO: 143389 - protein, 9 aa, Homo sapiens
YRYSVYGTT

SEQ ID NO: 143390 - protein, 9 aa, Homo sapiens
RYSVYGTTL

SEQ ID NO: 143391 - protein, 9 aa, Homo sapiens
YSVYGTTLE

SEQ ID NO: 143392 - protein, 9 aa, Homo sapiens
SVYGTTLEK

SEQ ID NO: 143393 - protein, 9 aa, Homo sapiens
VYGTTLEKL

SEQ ID NO: 143394 - protein, 9 aa, Homo sapiens
YGTTLEKLT

SEQ ID NO: 143395 - protein, 9 aa, Homo sapiens
GTTLEKLTN

SEQ ID NO: 143396 - protein, 9 aa, Homo sapiens
TTLEKLTNK

SEQ ID NO: 143397 - protein, 9 aa, Homo sapiens
TLEKLTNKG

SEQ ID NO: 143398 - protein, 9 aa, Homo sapiens
LEKLTNKGI

SEQ ID NO: 143399 - protein, 9 aa, Homo sapiens
EKLTNKGIC

SEQ ID NO: 143400 - protein, 9 aa, Homo sapiens
KLTNKGICD

SEQ ID NO: 143401 - protein, 9 aa, Homo sapiens
LTNKGICDL

SEQ ID NO: 143402 - protein, 9 aa, Homo sapiens
TNKGICDLL

SEQ ID NO: 143403 - protein, 9 aa, Homo sapiens
NKGICDLLI

SEQ ID NO: 143404 - protein, 9 aa, Homo sapiens
KGICDLLIR

SEQ ID NO: 143405 - protein, 9 aa, Homo sapiens
GICDLLIRC

SEQ ID NO: 143406 - protein, 9 aa, Homo sapiens
ICDLLIRCI

SEQ ID NO: 143407 - protein, 9 aa, Homo sapiens
CDLLIRCIT

SEQ ID NO: 143408 - protein, 9 aa, Homo sapiens
DLLIRCITC

SEQ ID NO: 143409 - protein, 9 aa, Homo sapiens
LLIRCITCQ

SEQ ID NO: 143410 - protein, 9 aa, Homo sapiens
LIRCITCQR

SEQ ID NO: 143411 - protein, 9 aa, Homo sapiens
IRCITCQRP

SEQ ID NO: 143412 - protein, 9 aa, Homo sapiens
RCITCQRPL

SEQ ID NO: 143413 - protein, 9 aa, Homo sapiens
CITCQRPLC

SEQ ID NO: 143414 - protein, 9 aa, Homo sapiens
ITCQRPLCP

SEQ ID NO: 143415 - protein, 9 aa, Homo sapiens
TCQRPLCPE

SEQ ID NO: 143416 - protein, 9 aa, Homo sapiens
CQRPLCPEE

SEQ ID NO: 143417 - protein, 9 aa, Homo sapiens
QRPLCPEEK

SEQ ID NO: 143418 - protein, 9 aa, Homo sapiens
RPLCPEEKQ

SEQ ID NO: 143419 - protein, 9 aa, Homo sapiens
PLCPEEKQR

SEQ ID NO: 143420 - protein, 9 aa, Homo sapiens
LCPEEKQRH

SEQ ID NO: 143421 - protein, 9 aa, Homo sapiens
CPEEKQRHL

SEQ ID NO: 143422 - protein, 9 aa, Homo sapiens
PEEKQRHLD

SEQ ID NO: 143423 - protein, 9 aa, Homo sapiens
EEKQRHLDK

SEQ ID NO: 143424 - protein, 9 aa, Homo sapiens
EKQRHLDKK

SEQ ID NO: 143425 - protein, 9 aa, Homo sapiens
KQRHLDKKK

SEQ ID NO: 143426 - protein, 9 aa, Homo sapiens
QRHLDKKKR

SEQ ID NO: 143427 - protein, 9 aa, Homo sapiens
RHLDKKKRF

SEQ ID NO: 143428 - protein, 9 aa, Homo sapiens
HLDKKKRFH

SEQ ID NO: 143429 - protein, 9 aa, Homo sapiens
LDKKKRFHN

SEQ ID NO: 143430 - protein, 9 aa, Homo sapiens
DKKKRFHNI

SEQ ID NO: 143431 - protein, 9 aa, Homo sapiens
KKKRFHNIG

SEQ ID NO: 143432 - protein, 9 aa, Homo sapiens
KKRFHNIGG

SEQ ID NO: 143433 - protein, 9 aa, Homo sapiens
KRFHNIGGR

SEQ ID NO: 143434 - protein, 9 aa, Homo sapiens
RFHNIGGRW

SEQ ID NO: 143435 - protein, 9 aa, Homo sapiens
FHNIGGRWT

SEQ ID NO: 143436 - protein, 9 aa, Homo sapiens
HNIGGRWTG

SEQ ID NO: 143437 - protein, 9 aa, Homo sapiens
NIGGRWTGR

SEQ ID NO: 143438 - protein, 9 aa, Homo sapiens
IGGRWTGRC

SEQ ID NO: 143439 - protein, 9 aa, Homo sapiens
GGRWTGRCI

SEQ ID NO: 143440 - protein, 9 aa, Homo sapiens
GRWTGRCIV

SEQ ID NO: 143441 - protein, 9 aa, Homo sapiens
RWTGRCIVC

SEQ ID NO: 143442 - protein, 9 aa, Homo sapiens
WTGRCIVCW

SEQ ID NO: 143443 - protein, 9 aa, Homo sapiens
TGRCIVCWR

SEQ ID NO: 143444 - protein, 9 aa, Homo sapiens
GRCIVCWRR

SEQ ID NO: 143445 - protein, 9 aa, Homo sapiens
RCIVCWRRP

SEQ ID NO: 143446 - protein, 9 aa, Homo sapiens
CIVCWRRPR

SEQ ID NO: 143447 - protein, 9 aa, Homo sapiens
IVCWRRPRT

SEQ ID NO: 143448 - protein, 9 aa, Homo sapiens
VCWRRPRTE

SEQ ID NO: 143449 - protein, 9 aa, Homo sapiens
CWRRPRTET

SEQ ID NO: 143450 - protein, 9 aa, Homo sapiens
WRRPRTETQ

SEQ ID NO: 143451 - protein, 9 aa, Homo sapiens
RRPRTETQV

SEQ ID NO: 143452 - protein, 8 aa, Homo sapiens
RPRTETQV

SEQ ID NO: 143453 - protein, 7 aa, Homo sapiens
PRTETQV

SEQ ID NO: 143454 - protein, 9 aa, Homo sapiens
MFQDTEEKP

SEQ ID NO: 143455 - protein, 9 aa, Homo sapiens
FQDTEEKPR

SEQ ID NO: 143456 - protein, 9 aa, Homo sapiens
QDTEEKPRT

SEQ ID NO: 143457 - protein, 9 aa, Homo sapiens
DTEEKPRTL

SEQ ID NO: 143458 - protein, 9 aa, Homo sapiens
TEEKPRTLH

SEQ ID NO: 143459 - protein, 9 aa, Homo sapiens
EEKPRTLHD

SEQ ID NO: 143460 - protein, 9 aa, Homo sapiens
EKPRTLHDL

SEQ ID NO: 143461 - protein, 9 aa, Homo sapiens
KPRTLHDLC

SEQ ID NO: 143462 - protein, 9 aa, Homo sapiens
PRTLHDLCQ

SEQ ID NO: 143463 - protein, 9 aa, Homo sapiens
RTLHDLCQA

SEQ ID NO: 143464 - protein, 9 aa, Homo sapiens
TLHDLCQAL

SEQ ID NO: 143465 - protein, 9 aa, Homo sapiens
LHDLCQALE

SEQ ID NO: 143466 - protein, 9 aa, Homo sapiens
HDLCQALET

SEQ ID NO: 143467 - protein, 9 aa, Homo sapiens
DLCQALETT

SEQ ID NO: 143468 - protein, 9 aa, Homo sapiens
LCQALETTI

SEQ ID NO: 143469 - protein, 9 aa, Homo sapiens
CQALETTIH

SEQ ID NO: 143470 - protein, 9 aa, Homo sapiens
QALETTIHN

SEQ ID NO: 143471 - protein, 9 aa, Homo sapiens
ALETTIHNI

SEQ ID NO: 143472 - protein, 9 aa, Homo sapiens
LETTIHNIE

SEQ ID NO: 143473 - protein, 9 aa, Homo sapiens
ETTIHNIEL

SEQ ID NO: 143474 - protein, 9 aa, Homo sapiens
TTIHNIELQ

SEQ ID NO: 143475 - protein, 9 aa, Homo sapiens
TIHNIELQC

SEQ ID NO: 143476 - protein, 9 aa, Homo sapiens
IHNIELQCV

SEQ ID NO: 143477 - protein, 9 aa, Homo sapiens
HNIELQCVE

SEQ ID NO: 143478 - protein, 9 aa, Homo sapiens
NIELQCVEC

SEQ ID NO: 143479 - protein, 9 aa, Homo sapiens
IELQCVECK

SEQ ID NO: 143480 - protein, 9 aa, Homo sapiens
ELQCVECKK

SEQ ID NO: 143481 - protein, 9 aa, Homo sapiens
LQCVECKKP

SEQ ID NO: 143482 - protein, 9 aa, Homo sapiens
QCVECKKPL

SEQ ID NO: 143483 - protein, 9 aa, Homo sapiens
CVECKKPLQ

SEQ ID NO: 143484 - protein, 9 aa, Homo sapiens
VECKKPLQR

SEQ ID NO: 143485 - protein, 9 aa, Homo sapiens
ECKKPLQRS

SEQ ID NO: 143486 - protein, 9 aa, Homo sapiens
CKKPLQRSE

SEQ ID NO: 143487 - protein, 9 aa, Homo sapiens
KKPLQRSEV

SEQ ID NO: 143488 - protein, 9 aa, Homo sapiens
KPLQRSEVY

SEQ ID NO: 143489 - protein, 9 aa, Homo sapiens
PLQRSEVYD

SEQ ID NO: 143490 - protein, 9 aa, Homo sapiens
LQRSEVYDF

SEQ ID NO: 143491 - protein, 9 aa, Homo sapiens
QRSEVYDFA

SEQ ID NO: 143492 - protein, 9 aa, Homo sapiens
RSEVYDFAF

SEQ ID NO: 143493 - protein, 9 aa, Homo sapiens
SEVYDFAFA

SEQ ID NO: 143494 - protein, 9 aa, Homo sapiens
EVYDFAFAD

SEQ ID NO: 143495 - protein, 9 aa, Homo sapiens
VYDFAFADL

SEQ ID NO: 143496 - protein, 9 aa, Homo sapiens
YDFAFADLT

SEQ ID NO: 143497 - protein, 9 aa, Homo sapiens
DFAFADLTV

SEQ ID NO: 143498 - protein, 9 aa, Homo sapiens
FAFADLTVV

SEQ ID NO: 143499 - protein, 9 aa, Homo sapiens
AFADLTVVY

SEQ ID NO: 143500 - protein, 9 aa, Homo sapiens
FADLTVVYR

SEQ ID NO: 143501 - protein, 9 aa, Homo sapiens
ADLTVVYRE

SEQ ID NO: 143502 - protein, 9 aa, Homo sapiens
DLTVVYREG

SEQ ID NO: 143503 - protein, 9 aa, Homo sapiens
LTVVYREGN

SEQ ID NO: 143504 - protein, 9 aa, Homo sapiens
TVVYREGNP

SEQ ID NO: 143505 - protein, 9 aa, Homo sapiens
VVYREGNPF

SEQ ID NO: 143506 - protein, 9 aa, Homo sapiens
VYREGNPFG

SEQ ID NO: 143507 - protein, 9 aa, Homo sapiens
YREGNPFGI

SEQ ID NO: 143508 - protein, 9 aa, Homo sapiens
REGNPFGIC

SEQ ID NO: 143509 - protein, 9 aa, Homo sapiens
EGNPFGICK

SEQ ID NO: 143510 - protein, 9 aa, Homo sapiens
GNPFGICKL

SEQ ID NO: 143511 - protein, 9 aa, Homo sapiens
NPFGICKLC

SEQ ID NO: 143512 - protein, 9 aa, Homo sapiens
PFGICKLCL

SEQ ID NO: 143513 - protein, 9 aa, Homo sapiens
FGICKLCLR

SEQ ID NO: 143514 - protein, 9 aa, Homo sapiens
GICKLCLRF

SEQ ID NO: 143515 - protein, 9 aa, Homo sapiens
ICKLCLRFL

SEQ ID NO: 143516 - protein, 9 aa, Homo sapiens
CKLCLRFLS

SEQ ID NO: 143517 - protein, 9 aa, Homo sapiens
KLCLRFLSK

SEQ ID NO: 143518 - protein, 9 aa, Homo sapiens
LCLRFLSKI

SEQ ID NO: 143519 - protein, 9 aa, Homo sapiens
CLRFLSKIS

SEQ ID NO: 143520 - protein, 9 aa, Homo sapiens
LRFLSKISE

SEQ ID NO: 143521 - protein, 9 aa, Homo sapiens
RFLSKISEY

SEQ ID NO: 143522 - protein, 9 aa, Homo sapiens
FLSKISEYR

SEQ ID NO: 143523 - protein, 9 aa, Homo sapiens
LSKISEYRH

SEQ ID NO: 143524 - protein, 9 aa, Homo sapiens
SKISEYRHY

SEQ ID NO: 143525 - protein, 9 aa, Homo sapiens
KISEYRHYN

SEQ ID NO: 143526 - protein, 9 aa, Homo sapiens
ISEYRHYNY

SEQ ID NO: 143527 - protein, 9 aa, Homo sapiens
SEYRHYNYS

SEQ ID NO: 143528 - protein, 9 aa, Homo sapiens
EYRHYNYSV

SEQ ID NO: 143529 - protein, 9 aa, Homo sapiens
YRHYNYSVY

SEQ ID NO: 143530 - protein, 9 aa, Homo sapiens
RHYNYSVYG

SEQ ID NO: 143531 - protein, 9 aa, Homo sapiens
HYNYSVYGN

SEQ ID NO: 143532 - protein, 9 aa, Homo sapiens
YNYSVYGNT

SEQ ID NO: 143533 - protein, 9 aa, Homo sapiens
NYSVYGNTL

SEQ ID NO: 143534 - protein, 9 aa, Homo sapiens
YSVYGNTLE

SEQ ID NO: 143535 - protein, 9 aa, Homo sapiens
SVYGNTLEQ

SEQ ID NO: 143536 - protein, 9 aa, Homo sapiens
VYGNTLEQT

SEQ ID NO: 143537 - protein, 9 aa, Homo sapiens
YGNTLEQTV

SEQ ID NO: 143538 - protein, 9 aa, Homo sapiens
GNTLEQTVK

SEQ ID NO: 143539 - protein, 9 aa, Homo sapiens
NTLEQTVKK

SEQ ID NO: 143540 - protein, 9 aa, Homo sapiens
TLEQTVKKP

SEQ ID NO: 143541 - protein, 9 aa, Homo sapiens
LEQTVKKPL

SEQ ID NO: 143542 - protein, 9 aa, Homo sapiens
EQTVKKPLN

SEQ ID NO: 143543 - protein, 9 aa, Homo sapiens
QTVKKPLNE

SEQ ID NO: 143544 - protein, 9 aa, Homo sapiens
TVKKPLNEI

SEQ ID NO: 143545 - protein, 9 aa, Homo sapiens
VKKPLNEIL

SEQ ID NO: 143546 - protein, 9 aa, Homo sapiens
KKPLNEILI

SEQ ID NO: 143547 - protein, 9 aa, Homo sapiens
KPLNEILIR

SEQ ID NO: 143548 - protein, 9 aa, Homo sapiens
PLNEILIRC

SEQ ID NO: 143549 - protein, 9 aa, Homo sapiens
LNEILIRCI

SEQ ID NO: 143550 - protein, 9 aa, Homo sapiens
NEILIRCII

SEQ ID NO: 143551 - protein, 9 aa, Homo sapiens
EILIRCIIC

SEQ ID NO: 143552 - protein, 9 aa, Homo sapiens
ILIRCIICQ

SEQ ID NO: 143553 - protein, 9 aa, Homo sapiens
LIRCIICQR

SEQ ID NO: 143554 - protein, 9 aa, Homo sapiens
IRCIICQRP

SEQ ID NO: 143555 - protein, 9 aa, Homo sapiens
RCIICQRPL

SEQ ID NO: 143556 - protein, 9 aa, Homo sapiens
CIICQRPLC

SEQ ID NO: 143557 - protein, 9 aa, Homo sapiens
IICQRPLCP

SEQ ID NO: 143558 - protein, 9 aa, Homo sapiens
ICQRPLCPQ

SEQ ID NO: 143559 - protein, 9 aa, Homo sapiens
CQRPLCPQE

SEQ ID NO: 143560 - protein, 9 aa, Homo sapiens
QRPLCPQEK

SEQ ID NO: 143561 - protein, 9 aa, Homo sapiens
RPLCPQEKK

SEQ ID NO: 143562 - protein, 9 aa, Homo sapiens
PLCPQEKKR

SEQ ID NO: 143563 - protein, 9 aa, Homo sapiens
LCPQEKKRH

SEQ ID NO: 143564 - protein, 9 aa, Homo sapiens
CPQEKKRHV

SEQ ID NO: 143565 - protein, 9 aa, Homo sapiens
PQEKKRHVD

SEQ ID NO: 143566 - protein, 9 aa, Homo sapiens
QEKKRHVDL

SEQ ID NO: 143567 - protein, 9 aa, Homo sapiens
EKKRHVDLN

SEQ ID NO: 143568 - protein, 9 aa, Homo sapiens
KKRHVDLNK

SEQ ID NO: 143569 - protein, 9 aa, Homo sapiens
KRHVDLNKR

SEQ ID NO: 143570 - protein, 9 aa, Homo sapiens
RHVDLNKRF

SEQ ID NO: 143571 - protein, 9 aa, Homo sapiens
HVDLNKRFH

SEQ ID NO: 143572 - protein, 9 aa, Homo sapiens
VDLNKRFHN

SEQ ID NO: 143573 - protein, 9 aa, Homo sapiens
DLNKRFHNI

SEQ ID NO: 143574 - protein, 9 aa, Homo sapiens
LNKRFHNIS

SEQ ID NO: 143575 - protein, 9 aa, Homo sapiens
NKRFHNISG

SEQ ID NO: 143576 - protein, 9 aa, Homo sapiens
KRFHNISGR

SEQ ID NO: 143577 - protein, 9 aa, Homo sapiens
RFHNISGRW

SEQ ID NO: 143578 - protein, 9 aa, Homo sapiens
FHNISGRWA

SEQ ID NO: 143579 - protein, 9 aa, Homo sapiens
HNISGRWAG

SEQ ID NO: 143580 - protein, 9 aa, Homo sapiens
NISGRWAGR

SEQ ID NO: 143581 - protein, 9 aa, Homo sapiens
ISGRWAGRC

SEQ ID NO: 143582 - protein, 9 aa, Homo sapiens
SGRWAGRCA

SEQ ID NO: 143583 - protein, 9 aa, Homo sapiens
GRWAGRCAA

SEQ ID NO: 143584 - protein, 9 aa, Homo sapiens
RWAGRCAAC

SEQ ID NO: 143585 - protein, 9 aa, Homo sapiens
WAGRCAACW

SEQ ID NO: 143586 - protein, 9 aa, Homo sapiens
AGRCAACWR

SEQ ID NO: 143587 - protein, 9 aa, Homo sapiens
GRCAACWRS

SEQ ID NO: 143588 - protein, 9 aa, Homo sapiens
RCAACWRSR

SEQ ID NO: 143589 - protein, 9 aa, Homo sapiens
CAACWRSRR

SEQ ID NO: 143590 - protein, 9 aa, Homo sapiens
AACWRSRRR

SEQ ID NO: 143591 - protein, 9 aa, Homo sapiens
ACWRSRRRE

SEQ ID NO: 143592 - protein, 9 aa, Homo sapiens
CWRSRRRET

SEQ ID NO: 143593 - protein, 9 aa, Homo sapiens
WRSRRRETA

SEQ ID NO: 143594 - protein, 9 aa, Homo sapiens
RSRRRETAL

SEQ ID NO: 143595 - protein, 8 aa, Homo sapiens
SRRRETAL

SEQ ID NO: 143596 - protein, 7 aa, Homo sapiens
RRRETAL

SEQ ID NO: 143597 - protein, 9 aa, Homo sapiens
MFQDPAERP

SEQ ID NO: 143598 - protein, 9 aa, Homo sapiens
FQDPAERPY

SEQ ID NO: 143599 - protein, 9 aa, Homo sapiens
QDPAERPYK

SEQ ID NO: 143600 - protein, 9 aa, Homo sapiens
DPAERPYKL

SEQ ID NO: 143601 - protein, 9 aa, Homo sapiens
PAERPYKLH

SEQ ID NO: 143602 - protein, 9 aa, Homo sapiens
AERPYKLHD

SEQ ID NO: 143603 - protein, 9 aa, Homo sapiens
ERPYKLHDL

SEQ ID NO: 143604 - protein, 9 aa, Homo sapiens
RPYKLHDLC

SEQ ID NO: 143605 - protein, 9 aa, Homo sapiens
PYKLHDLCN

SEQ ID NO: 143606 - protein, 9 aa, Homo sapiens
YKLHDLCNE

SEQ ID NO: 143607 - protein, 9 aa, Homo sapiens
KLHDLCNEV

SEQ ID NO: 143608 - protein, 9 aa, Homo sapiens
LHDLCNEVE

SEQ ID NO: 143609 - protein, 9 aa, Homo sapiens
HDLCNEVEE

SEQ ID NO: 143610 - protein, 9 aa, Homo sapiens
DLCNEVEES

SEQ ID NO: 143611 - protein, 9 aa, Homo sapiens
LCNEVEESI

SEQ ID NO: 143612 - protein, 9 aa, Homo sapiens
CNEVEESIH

SEQ ID NO: 143613 - protein, 9 aa, Homo sapiens
NEVEESIHE

SEQ ID NO: 143614 - protein, 9 aa, Homo sapiens
EVEESIHEI

SEQ ID NO: 143615 - protein, 9 aa, Homo sapiens
VEESIHEIC

SEQ ID NO: 143616 - protein, 9 aa, Homo sapiens
EESIHEICL

SEQ ID NO: 143617 - protein, 9 aa, Homo sapiens
ESIHEICLN

SEQ ID NO: 143618 - protein, 9 aa, Homo sapiens
SIHEICLNC

SEQ ID NO: 143619 - protein, 9 aa, Homo sapiens
IHEICLNCV

SEQ ID NO: 143620 - protein, 9 aa, Homo sapiens
HEICLNCVY

SEQ ID NO: 143621 - protein, 9 aa, Homo sapiens
EICLNCVYC

SEQ ID NO: 143622 - protein, 9 aa, Homo sapiens
ICLNCVYCK

SEQ ID NO: 143623 - protein, 9 aa, Homo sapiens
CLNCVYCKQ

SEQ ID NO: 143624 - protein, 9 aa, Homo sapiens
LNCVYCKQE

SEQ ID NO: 143625 - protein, 9 aa, Homo sapiens
NCVYCKQEL

SEQ ID NO: 143626 - protein, 9 aa, Homo sapiens
CVYCKQELQ

SEQ ID NO: 143627 - protein, 9 aa, Homo sapiens
VYCKQELQR

SEQ ID NO: 143628 - protein, 9 aa, Homo sapiens
YCKQELQRS

SEQ ID NO: 143629 - protein, 9 aa, Homo sapiens
CKQELQRSE

SEQ ID NO: 143630 - protein, 9 aa, Homo sapiens
KQELQRSEV

SEQ ID NO: 143631 - protein, 9 aa, Homo sapiens
QELQRSEVY

SEQ ID NO: 143632 - protein, 9 aa, Homo sapiens
ELQRSEVYD

SEQ ID NO: 143633 - protein, 9 aa, Homo sapiens
LQRSEVYDF

SEQ ID NO: 143634 - protein, 9 aa, Homo sapiens
QRSEVYDFA

SEQ ID NO: 143635 - protein, 9 aa, Homo sapiens
RSEVYDFAC

SEQ ID NO: 143636 - protein, 9 aa, Homo sapiens
SEVYDFACY

SEQ ID NO: 143637 - protein, 9 aa, Homo sapiens
EVYDFACYD

SEQ ID NO: 143638 - protein, 9 aa, Homo sapiens
VYDFACYDL

SEQ ID NO: 143639 - protein, 9 aa, Homo sapiens
YDFACYDLC

SEQ ID NO: 143640 - protein, 9 aa, Homo sapiens
DFACYDLCI

SEQ ID NO: 143641 - protein, 9 aa, Homo sapiens
FACYDLCIV

SEQ ID NO: 143642 - protein, 9 aa, Homo sapiens
ACYDLCIVY

SEQ ID NO: 143643 - protein, 9 aa, Homo sapiens
CYDLCIVYR

SEQ ID NO: 143644 - protein, 9 aa, Homo sapiens
YDLCIVYRE

SEQ ID NO: 143645 - protein, 9 aa, Homo sapiens
DLCIVYREG

SEQ ID NO: 143646 - protein, 9 aa, Homo sapiens
LCIVYREGQ

SEQ ID NO: 143647 - protein, 9 aa, Homo sapiens
CIVYREGQP

SEQ ID NO: 143648 - protein, 9 aa, Homo sapiens
IVYREGQPY

SEQ ID NO: 143649 - protein, 9 aa, Homo sapiens
VYREGQPYG

SEQ ID NO: 143650 - protein, 9 aa, Homo sapiens
YREGQPYGV

SEQ ID NO: 143651 - protein, 9 aa, Homo sapiens
REGQPYGVC

SEQ ID NO: 143652 - protein, 9 aa, Homo sapiens
EGQPYGVCM

SEQ ID NO: 143653 - protein, 9 aa, Homo sapiens
GQPYGVCMK

SEQ ID NO: 143654 - protein, 9 aa, Homo sapiens
QPYGVCMKC

SEQ ID NO: 143655 - protein, 9 aa, Homo sapiens
PYGVCMKCL

SEQ ID NO: 143656 - protein, 9 aa, Homo sapiens
YGVCMKCLK

SEQ ID NO: 143657 - protein, 9 aa, Homo sapiens
GVCMKCLKF

SEQ ID NO: 143658 - protein, 9 aa, Homo sapiens
VCMKCLKFY

SEQ ID NO: 143659 - protein, 9 aa, Homo sapiens
CMKCLKFYS

SEQ ID NO: 143660 - protein, 9 aa, Homo sapiens
MKCLKFYSK

SEQ ID NO: 143661 - protein, 9 aa, Homo sapiens
KCLKFYSKI

SEQ ID NO: 143662 - protein, 9 aa, Homo sapiens
CLKFYSKIS

SEQ ID NO: 143663 - protein, 9 aa, Homo sapiens
LKFYSKISE

SEQ ID NO: 143664 - protein, 9 aa, Homo sapiens
KFYSKISEY

SEQ ID NO: 143665 - protein, 9 aa, Homo sapiens
FYSKISEYR

SEQ ID NO: 143666 - protein, 9 aa, Homo sapiens
YSKISEYRW

SEQ ID NO: 143667 - protein, 9 aa, Homo sapiens
SKISEYRWY

SEQ ID NO: 143668 - protein, 9 aa, Homo sapiens
KISEYRWYR

SEQ ID NO: 143669 - protein, 9 aa, Homo sapiens
ISEYRWYRY

SEQ ID NO: 143670 - protein, 9 aa, Homo sapiens
SEYRWYRYS

SEQ ID NO: 143671 - protein, 9 aa, Homo sapiens
EYRWYRYSV

SEQ ID NO: 143672 - protein, 9 aa, Homo sapiens
YRWYRYSVY

SEQ ID NO: 143673 - protein, 9 aa, Homo sapiens
RWYRYSVYG

SEQ ID NO: 143674 - protein, 9 aa, Homo sapiens
WYRYSVYGE

SEQ ID NO: 143675 - protein, 9 aa, Homo sapiens
YRYSVYGET

SEQ ID NO: 143676 - protein, 9 aa, Homo sapiens
RYSVYGETL

SEQ ID NO: 143677 - protein, 9 aa, Homo sapiens
YSVYGETLE

SEQ ID NO: 143678 - protein, 9 aa, Homo sapiens
SVYGETLEK

SEQ ID NO: 143679 - protein, 9 aa, Homo sapiens
VYGETLEKQ

SEQ ID NO: 143680 - protein, 9 aa, Homo sapiens
YGETLEKQC

SEQ ID NO: 143681 - protein, 9 aa, Homo sapiens
GETLEKQCN

SEQ ID NO: 143682 - protein, 9 aa, Homo sapiens
ETLEKQCNK

SEQ ID NO: 143683 - protein, 9 aa, Homo sapiens
TLEKQCNKQ

SEQ ID NO: 143684 - protein, 9 aa, Homo sapiens
LEKQCNKQL

SEQ ID NO: 143685 - protein, 9 aa, Homo sapiens
EKQCNKQLC

SEQ ID NO: 143686 - protein, 9 aa, Homo sapiens
KQCNKQLCH

SEQ ID NO: 143687 - protein, 9 aa, Homo sapiens
QCNKQLCHL

SEQ ID NO: 143688 - protein, 9 aa, Homo sapiens
CNKQLCHLL

SEQ ID NO: 143689 - protein, 9 aa, Homo sapiens
NKQLCHLLI

SEQ ID NO: 143690 - protein, 9 aa, Homo sapiens
KQLCHLLIR

SEQ ID NO: 143691 - protein, 9 aa, Homo sapiens
QLCHLLIRC

SEQ ID NO: 143692 - protein, 9 aa, Homo sapiens
LCHLLIRCI

SEQ ID NO: 143693 - protein, 9 aa, Homo sapiens
CHLLIRCIT

SEQ ID NO: 143694 - protein, 9 aa, Homo sapiens
HLLIRCITC

SEQ ID NO: 143695 - protein, 9 aa, Homo sapiens
LLIRCITCQ

SEQ ID NO: 143696 - protein, 9 aa, Homo sapiens
LIRCITCQK

SEQ ID NO: 143697 - protein, 9 aa, Homo sapiens
IRCITCQKP

SEQ ID NO: 143698 - protein, 9 aa, Homo sapiens
RCITCQKPL

SEQ ID NO: 143699 - protein, 9 aa, Homo sapiens
CITCQKPLC

SEQ ID NO: 143700 - protein, 9 aa, Homo sapiens
ITCQKPLCP

SEQ ID NO: 143701 - protein, 9 aa, Homo sapiens
TCQKPLCPV

SEQ ID NO: 143702 - protein, 9 aa, Homo sapiens
CQKPLCPVE

SEQ ID NO: 143703 - protein, 9 aa, Homo sapiens
QKPLCPVEK

SEQ ID NO: 143704 - protein, 9 aa, Homo sapiens
KPLCPVEKQ

SEQ ID NO: 143705 - protein, 9 aa, Homo sapiens
PLCPVEKQR

SEQ ID NO: 143706 - protein, 9 aa, Homo sapiens
LCPVEKQRH

SEQ ID NO: 143707 - protein, 9 aa, Homo sapiens
CPVEKQRHL

SEQ ID NO: 143708 - protein, 9 aa, Homo sapiens
PVEKQRHLE

SEQ ID NO: 143709 - protein, 9 aa, Homo sapiens
VEKQRHLEE

SEQ ID NO: 143710 - protein, 9 aa, Homo sapiens
EKQRHLEEK

SEQ ID NO: 143711 - protein, 9 aa, Homo sapiens
KQRHLEEKK

SEQ ID NO: 143712 - protein, 9 aa, Homo sapiens
QRHLEEKKR

SEQ ID NO: 143713 - protein, 9 aa, Homo sapiens
RHLEEKKRF

SEQ ID NO: 143714 - protein, 9 aa, Homo sapiens
HLEEKKRFH

SEQ ID NO: 143715 - protein, 9 aa, Homo sapiens
LEEKKRFHN

SEQ ID NO: 143716 - protein, 9 aa, Homo sapiens
EEKKRFHNI

SEQ ID NO: 143717 - protein, 9 aa, Homo sapiens
EKKRFHNIG

SEQ ID NO: 143718 - protein, 9 aa, Homo sapiens
KKRFHNIGG

SEQ ID NO: 143719 - protein, 9 aa, Homo sapiens
KRFHNIGGR

SEQ ID NO: 143720 - protein, 9 aa, Homo sapiens
RFHNIGGRW

SEQ ID NO: 143721 - protein, 9 aa, Homo sapiens
FHNIGGRWT

SEQ ID NO: 143722 - protein, 9 aa, Homo sapiens
HNIGGRWTG

SEQ ID NO: 143723 - protein, 9 aa, Homo sapiens
NIGGRWTGR

SEQ ID NO: 143724 - protein, 9 aa, Homo sapiens
IGGRWTGRC

SEQ ID NO: 143725 - protein, 9 aa, Homo sapiens
GGRWTGRCM

SEQ ID NO: 143726 - protein, 9 aa, Homo sapiens
GRWTGRCMS

SEQ ID NO: 143727 - protein, 9 aa, Homo sapiens
RWTGRCMSC

SEQ ID NO: 143728 - protein, 9 aa, Homo sapiens
WTGRCMSCW

SEQ ID NO: 143729 - protein, 9 aa, Homo sapiens
TGRCMSCWK

SEQ ID NO: 143730 - protein, 9 aa, Homo sapiens
GRCMSCWKP

SEQ ID NO: 143731 - protein, 9 aa, Homo sapiens
RCMSCWKPT

SEQ ID NO: 143732 - protein, 9 aa, Homo sapiens
CMSCWKPTR

SEQ ID NO: 143733 - protein, 9 aa, Homo sapiens
MSCWKPTRR

SEQ ID NO: 143734 - protein, 9 aa, Homo sapiens
SCWKPTRRE

SEQ ID NO: 143735 - protein, 9 aa, Homo sapiens
CWKPTRRET

SEQ ID NO: 143736 - protein, 9 aa, Homo sapiens
WKPTRRETE

SEQ ID NO: 143737 - protein, 9 aa, Homo sapiens
KPTRRETEV

SEQ ID NO: 143738 - protein, 8 aa, Homo sapiens
PTRRETEV

SEQ ID NO: 143739 - protein, 7 aa, Homo sapiens
TRRETEV

SEQ ID NO: 143740 - protein, 9 aa, Homo sapiens
MFEDPATRP

SEQ ID NO: 143741 - protein, 9 aa, Homo sapiens
FEDPATRPR

SEQ ID NO: 143742 - protein, 9 aa, Homo sapiens
EDPATRPRT

SEQ ID NO: 143743 - protein, 9 aa, Homo sapiens
DPATRPRTL

SEQ ID NO: 143744 - protein, 9 aa, Homo sapiens
PATRPRTLH

SEQ ID NO: 143745 - protein, 9 aa, Homo sapiens
ATRPRTLHE

SEQ ID NO: 143746 - protein, 9 aa, Homo sapiens
TRPRTLHEL

SEQ ID NO: 143747 - protein, 9 aa, Homo sapiens
RPRTLHELC

SEQ ID NO: 143748 - protein, 9 aa, Homo sapiens
PRTLHELCE

SEQ ID NO: 143749 - protein, 9 aa, Homo sapiens
RTLHELCEV

SEQ ID NO: 143750 - protein, 9 aa, Homo sapiens
TLHELCEVL

SEQ ID NO: 143751 - protein, 9 aa, Homo sapiens
LHELCEVLE

SEQ ID NO: 143752 - protein, 9 aa, Homo sapiens
HELCEVLEE

SEQ ID NO: 143753 - protein, 9 aa, Homo sapiens
ELCEVLEES

SEQ ID NO: 143754 - protein, 9 aa, Homo sapiens
LCEVLEESV

SEQ ID NO: 143755 - protein, 9 aa, Homo sapiens
CEVLEESVH

SEQ ID NO: 143756 - protein, 9 aa, Homo sapiens
EVLEESVHE

SEQ ID NO: 143757 - protein, 9 aa, Homo sapiens
VLEESVHEI

SEQ ID NO: 143758 - protein, 9 aa, Homo sapiens
LEESVHEIR

SEQ ID NO: 143759 - protein, 9 aa, Homo sapiens
EESVHEIRL

SEQ ID NO: 143760 - protein, 9 aa, Homo sapiens
ESVHEIRLQ

SEQ ID NO: 143761 - protein, 9 aa, Homo sapiens
SVHEIRLQC

SEQ ID NO: 143762 - protein, 9 aa, Homo sapiens
VHEIRLQCV

SEQ ID NO: 143763 - protein, 9 aa, Homo sapiens
HEIRLQCVQ

SEQ ID NO: 143764 - protein, 9 aa, Homo sapiens
EIRLQCVQC

SEQ ID NO: 143765 - protein, 9 aa, Homo sapiens
IRLQCVQCK

SEQ ID NO: 143766 - protein, 9 aa, Homo sapiens
RLQCVQCKK

SEQ ID NO: 143767 - protein, 9 aa, Homo sapiens
LQCVQCKKE

SEQ ID NO: 143768 - protein, 9 aa, Homo sapiens
QCVQCKKEL

SEQ ID NO: 143769 - protein, 9 aa, Homo sapiens
CVQCKKELQ

SEQ ID NO: 143770 - protein, 9 aa, Homo sapiens
VQCKKELQR

SEQ ID NO: 143771 - protein, 9 aa, Homo sapiens
QCKKELQRR

SEQ ID NO: 143772 - protein, 9 aa, Homo sapiens
CKKELQRRE

SEQ ID NO: 143773 - protein, 9 aa, Homo sapiens
KKELQRREV

SEQ ID NO: 143774 - protein, 9 aa, Homo sapiens
KELQRREVY

SEQ ID NO: 143775 - protein, 9 aa, Homo sapiens
ELQRREVYK

SEQ ID NO: 143776 - protein, 9 aa, Homo sapiens
LQRREVYKF

SEQ ID NO: 143777 - protein, 9 aa, Homo sapiens
QRREVYKFL

SEQ ID NO: 143778 - protein, 9 aa, Homo sapiens
RREVYKFLF

SEQ ID NO: 143779 - protein, 9 aa, Homo sapiens
REVYKFLFT

SEQ ID NO: 143780 - protein, 9 aa, Homo sapiens
EVYKFLFTD

SEQ ID NO: 143781 - protein, 9 aa, Homo sapiens
VYKFLFTDL

SEQ ID NO: 143782 - protein, 9 aa, Homo sapiens
YKFLFTDLR

SEQ ID NO: 143783 - protein, 9 aa, Homo sapiens
KFLFTDLRI

SEQ ID NO: 143784 - protein, 9 aa, Homo sapiens
FLFTDLRIV

SEQ ID NO: 143785 - protein, 9 aa, Homo sapiens
LFTDLRIVY

SEQ ID NO: 143786 - protein, 9 aa, Homo sapiens
FTDLRIVYR

SEQ ID NO: 143787 - protein, 9 aa, Homo sapiens
TDLRIVYRD

SEQ ID NO: 143788 - protein, 9 aa, Homo sapiens
DLRIVYRDN

SEQ ID NO: 143789 - protein, 9 aa, Homo sapiens
LRIVYRDNN

SEQ ID NO: 143790 - protein, 9 aa, Homo sapiens
RIVYRDNNP

SEQ ID NO: 143791 - protein, 9 aa, Homo sapiens
IVYRDNNPY

SEQ ID NO: 143792 - protein, 9 aa, Homo sapiens
VYRDNNPYG

SEQ ID NO: 143793 - protein, 9 aa, Homo sapiens
YRDNNPYGV

SEQ ID NO: 143794 - protein, 9 aa, Homo sapiens
RDNNPYGVC

SEQ ID NO: 143795 - protein, 9 aa, Homo sapiens
DNNPYGVCI

SEQ ID NO: 143796 - protein, 9 aa, Homo sapiens
NNPYGVCIM

SEQ ID NO: 143797 - protein, 9 aa, Homo sapiens
NPYGVCIMC

SEQ ID NO: 143798 - protein, 9 aa, Homo sapiens
PYGVCIMCL

SEQ ID NO: 143799 - protein, 9 aa, Homo sapiens
YGVCIMCLR

SEQ ID NO: 143800 - protein, 9 aa, Homo sapiens
GVCIMCLRF

SEQ ID NO: 143801 - protein, 9 aa, Homo sapiens
VCIMCLRFL

SEQ ID NO: 143802 - protein, 9 aa, Homo sapiens
CIMCLRFLS

SEQ ID NO: 143803 - protein, 9 aa, Homo sapiens
IMCLRFLSK

SEQ ID NO: 143804 - protein, 9 aa, Homo sapiens
MCLRFLSKI

SEQ ID NO: 143805 - protein, 9 aa, Homo sapiens
CLRFLSKIS

SEQ ID NO: 143806 - protein, 9 aa, Homo sapiens
LRFLSKISE

SEQ ID NO: 143807 - protein, 9 aa, Homo sapiens
RFLSKISEY

SEQ ID NO: 143808 - protein, 9 aa, Homo sapiens
FLSKISEYR

SEQ ID NO: 143809 - protein, 9 aa, Homo sapiens
LSKISEYRH

SEQ ID NO: 143810 - protein, 9 aa, Homo sapiens
SKISEYRHY

SEQ ID NO: 143811 - protein, 9 aa, Homo sapiens
KISEYRHYQ

SEQ ID NO: 143812 - protein, 9 aa, Homo sapiens
ISEYRHYQY

SEQ ID NO: 143813 - protein, 9 aa, Homo sapiens
SEYRHYQYS

SEQ ID NO: 143814 - protein, 9 aa, Homo sapiens
EYRHYQYSL

SEQ ID NO: 143815 - protein, 9 aa, Homo sapiens
YRHYQYSLY

SEQ ID NO: 143816 - protein, 9 aa, Homo sapiens
RHYQYSLYG

SEQ ID NO: 143817 - protein, 9 aa, Homo sapiens
HYQYSLYGK

SEQ ID NO: 143818 - protein, 9 aa, Homo sapiens
YQYSLYGKT

SEQ ID NO: 143819 - protein, 9 aa, Homo sapiens
QYSLYGKTL

SEQ ID NO: 143820 - protein, 9 aa, Homo sapiens
YSLYGKTLE

SEQ ID NO: 143821 - protein, 9 aa, Homo sapiens
SLYGKTLEE

SEQ ID NO: 143822 - protein, 9 aa, Homo sapiens
LYGKTLEER

SEQ ID NO: 143823 - protein, 9 aa, Homo sapiens
YGKTLEERV

SEQ ID NO: 143824 - protein, 9 aa, Homo sapiens
GKTLEERVR

SEQ ID NO: 143825 - protein, 9 aa, Homo sapiens
KTLEERVRK

SEQ ID NO: 143826 - protein, 9 aa, Homo sapiens
TLEERVRKP

SEQ ID NO: 143827 - protein, 9 aa, Homo sapiens
LEERVRKPL

SEQ ID NO: 143828 - protein, 9 aa, Homo sapiens
EERVRKPLS

SEQ ID NO: 143829 - protein, 9 aa, Homo sapiens
ERVRKPLSE

SEQ ID NO: 143830 - protein, 9 aa, Homo sapiens
RVRKPLSEI

SEQ ID NO: 143831 - protein, 9 aa, Homo sapiens
VRKPLSEIT

SEQ ID NO: 143832 - protein, 9 aa, Homo sapiens
RKPLSEITI

SEQ ID NO: 143833 - protein, 9 aa, Homo sapiens
KPLSEITIR

SEQ ID NO: 143834 - protein, 9 aa, Homo sapiens
PLSEITIRC

SEQ ID NO: 143835 - protein, 9 aa, Homo sapiens
LSEITIRCI

SEQ ID NO: 143836 - protein, 9 aa, Homo sapiens
SEITIRCII

SEQ ID NO: 143837 - protein, 9 aa, Homo sapiens
EITIRCIIC

SEQ ID NO: 143838 - protein, 9 aa, Homo sapiens
ITIRCIICQ

SEQ ID NO: 143839 - protein, 9 aa, Homo sapiens
TIRCIICQT

SEQ ID NO: 143840 - protein, 9 aa, Homo sapiens
IRCIICQTP

SEQ ID NO: 143841 - protein, 9 aa, Homo sapiens
RCIICQTPL

SEQ ID NO: 143842 - protein, 9 aa, Homo sapiens
CIICQTPLC

SEQ ID NO: 143843 - protein, 9 aa, Homo sapiens
IICQTPLCP

SEQ ID NO: 143844 - protein, 9 aa, Homo sapiens
ICQTPLCPE

SEQ ID NO: 143845 - protein, 9 aa, Homo sapiens
CQTPLCPEE

SEQ ID NO: 143846 - protein, 9 aa, Homo sapiens
QTPLCPEEK

SEQ ID NO: 143847 - protein, 9 aa, Homo sapiens
TPLCPEEKE

SEQ ID NO: 143848 - protein, 9 aa, Homo sapiens
PLCPEEKER

SEQ ID NO: 143849 - protein, 9 aa, Homo sapiens
LCPEEKERH

SEQ ID NO: 143850 - protein, 9 aa, Homo sapiens
CPEEKERHV

SEQ ID NO: 143851 - protein, 9 aa, Homo sapiens
PEEKERHVN

SEQ ID NO: 143852 - protein, 9 aa, Homo sapiens
EEKERHVNA

SEQ ID NO: 143853 - protein, 9 aa, Homo sapiens
EKERHVNAN

SEQ ID NO: 143854 - protein, 9 aa, Homo sapiens
KERHVNANK

SEQ ID NO: 143855 - protein, 9 aa, Homo sapiens
ERHVNANKR

SEQ ID NO: 143856 - protein, 9 aa, Homo sapiens
RHVNANKRF

SEQ ID NO: 143857 - protein, 9 aa, Homo sapiens
HVNANKRFH

SEQ ID NO: 143858 - protein, 9 aa, Homo sapiens
VNANKRFHN

SEQ ID NO: 143859 - protein, 9 aa, Homo sapiens
NANKRFHNI

SEQ ID NO: 143860 - protein, 9 aa, Homo sapiens
ANKRFHNIM

SEQ ID NO: 143861 - protein, 9 aa, Homo sapiens
NKRFHNIMG

SEQ ID NO: 143862 - protein, 9 aa, Homo sapiens
KRFHNIMGR

SEQ ID NO: 143863 - protein, 9 aa, Homo sapiens
RFHNIMGRW

SEQ ID NO: 143864 - protein, 9 aa, Homo sapiens
FHNIMGRWT

SEQ ID NO: 143865 - protein, 9 aa, Homo sapiens
HNIMGRWTG

SEQ ID NO: 143866 - protein, 9 aa, Homo sapiens
NIMGRWTGR

SEQ ID NO: 143867 - protein, 9 aa, Homo sapiens
IMGRWTGRC

SEQ ID NO: 143868 - protein, 9 aa, Homo sapiens
MGRWTGRCS

SEQ ID NO: 143869 - protein, 9 aa, Homo sapiens
GRWTGRCSE

SEQ ID NO: 143870 - protein, 9 aa, Homo sapiens
RWTGRCSEC

SEQ ID NO: 143871 - protein, 9 aa, Homo sapiens
WTGRCSECW

SEQ ID NO: 143872 - protein, 9 aa, Homo sapiens
TGRCSECWR

SEQ ID NO: 143873 - protein, 9 aa, Homo sapiens
GRCSECWRP

SEQ ID NO: 143874 - protein, 9 aa, Homo sapiens
RCSECWRPR

SEQ ID NO: 143875 - protein, 9 aa, Homo sapiens
CSECWRPRP

SEQ ID NO: 143876 - protein, 9 aa, Homo sapiens
SECWRPRPV

SEQ ID NO: 143877 - protein, 9 aa, Homo sapiens
ECWRPRPVT

SEQ ID NO: 143878 - protein, 9 aa, Homo sapiens
CWRPRPVTQ

SEQ ID NO: 143879 - protein, 9 aa, Homo sapiens
WRPRPVTQV

SEQ ID NO: 143880 - protein, 8 aa, Homo sapiens
RPRPVTQV

SEQ ID NO: 143881 - protein, 7 aa, Homo sapiens
PRPVTQV

SEQ ID NO: 143882 - protein, 9 aa, Homo sapiens
MFQDAEEKP

SEQ ID NO: 143883 - protein, 9 aa, Homo sapiens
FQDAEEKPR

SEQ ID NO: 143884 - protein, 9 aa, Homo sapiens
QDAEEKPRT

SEQ ID NO: 143885 - protein, 9 aa, Homo sapiens
DAEEKPRTL

SEQ ID NO: 143886 - protein, 9 aa, Homo sapiens
AEEKPRTLH

SEQ ID NO: 143887 - protein, 9 aa, Homo sapiens
EEKPRTLHD

SEQ ID NO: 143888 - protein, 9 aa, Homo sapiens
EKPRTLHDL

SEQ ID NO: 143889 - protein, 9 aa, Homo sapiens
KPRTLHDLC

SEQ ID NO: 143890 - protein, 9 aa, Homo sapiens
PRTLHDLCQ

SEQ ID NO: 143891 - protein, 9 aa, Homo sapiens
RTLHDLCQA

SEQ ID NO: 143892 - protein, 9 aa, Homo sapiens
TLHDLCQAL

SEQ ID NO: 143893 - protein, 9 aa, Homo sapiens
LHDLCQALE

SEQ ID NO: 143894 - protein, 9 aa, Homo sapiens
HDLCQALET

SEQ ID NO: 143895 - protein, 9 aa, Homo sapiens
DLCQALETS

SEQ ID NO: 143896 - protein, 9 aa, Homo sapiens
LCQALETSV

SEQ ID NO: 143897 - protein, 9 aa, Homo sapiens
CQALETSVH

SEQ ID NO: 143898 - protein, 9 aa, Homo sapiens
QALETSVHE

SEQ ID NO: 143899 - protein, 9 aa, Homo sapiens
ALETSVHEI

SEQ ID NO: 143900 - protein, 9 aa, Homo sapiens
LETSVHEIE

SEQ ID NO: 143901 - protein, 9 aa, Homo sapiens
ETSVHEIEL

SEQ ID NO: 143902 - protein, 9 aa, Homo sapiens
TSVHEIELK

SEQ ID NO: 143903 - protein, 9 aa, Homo sapiens
SVHEIELKC

SEQ ID NO: 143904 - protein, 9 aa, Homo sapiens
VHEIELKCV

SEQ ID NO: 143905 - protein, 9 aa, Homo sapiens
HEIELKCVE

SEQ ID NO: 143906 - protein, 9 aa, Homo sapiens
EIELKCVEC

SEQ ID NO: 143907 - protein, 9 aa, Homo sapiens
IELKCVECK

SEQ ID NO: 143908 - protein, 9 aa, Homo sapiens
ELKCVECKK

SEQ ID NO: 143909 - protein, 9 aa, Homo sapiens
LKCVECKKT

SEQ ID NO: 143910 - protein, 9 aa, Homo sapiens
KCVECKKTL

SEQ ID NO: 143911 - protein, 9 aa, Homo sapiens
CVECKKTLQ

SEQ ID NO: 143912 - protein, 9 aa, Homo sapiens
VECKKTLQR

SEQ ID NO: 143913 - protein, 9 aa, Homo sapiens
ECKKTLQRS

SEQ ID NO: 143914 - protein, 9 aa, Homo sapiens
CKKTLQRSE

SEQ ID NO: 143915 - protein, 9 aa, Homo sapiens
KKTLQRSEV

SEQ ID NO: 143916 - protein, 9 aa, Homo sapiens
KTLQRSEVY

SEQ ID NO: 143917 - protein, 9 aa, Homo sapiens
TLQRSEVYD

SEQ ID NO: 143918 - protein, 9 aa, Homo sapiens
LQRSEVYDF

SEQ ID NO: 143919 - protein, 9 aa, Homo sapiens
QRSEVYDFV

SEQ ID NO: 143920 - protein, 9 aa, Homo sapiens
RSEVYDFVF

SEQ ID NO: 143921 - protein, 9 aa, Homo sapiens
SEVYDFVFA

SEQ ID NO: 143922 - protein, 9 aa, Homo sapiens
EVYDFVFAD

SEQ ID NO: 143923 - protein, 9 aa, Homo sapiens
VYDFVFADL

SEQ ID NO: 143924 - protein, 9 aa, Homo sapiens
YDFVFADLR

SEQ ID NO: 143925 - protein, 9 aa, Homo sapiens
DFVFADLRI

SEQ ID NO: 143926 - protein, 9 aa, Homo sapiens
FVFADLRIV

SEQ ID NO: 143927 - protein, 9 aa, Homo sapiens
VFADLRIVY

SEQ ID NO: 143928 - protein, 9 aa, Homo sapiens
FADLRIVYR

SEQ ID NO: 143929 - protein, 9 aa, Homo sapiens
ADLRIVYRD

SEQ ID NO: 143930 - protein, 9 aa, Homo sapiens
DLRIVYRDG

SEQ ID NO: 143931 - protein, 9 aa, Homo sapiens
LRIVYRDGN

SEQ ID NO: 143932 - protein, 9 aa, Homo sapiens
RIVYRDGNP

SEQ ID NO: 143933 - protein, 9 aa, Homo sapiens
IVYRDGNPF

SEQ ID NO: 143934 - protein, 9 aa, Homo sapiens
VYRDGNPFA

SEQ ID NO: 143935 - protein, 9 aa, Homo sapiens
YRDGNPFAV

SEQ ID NO: 143936 - protein, 9 aa, Homo sapiens
RDGNPFAVC

SEQ ID NO: 143937 - protein, 9 aa, Homo sapiens
DGNPFAVCK

SEQ ID NO: 143938 - protein, 9 aa, Homo sapiens
GNPFAVCKV

SEQ ID NO: 143939 - protein, 9 aa, Homo sapiens
NPFAVCKVC

SEQ ID NO: 143940 - protein, 9 aa, Homo sapiens
PFAVCKVCL

SEQ ID NO: 143941 - protein, 9 aa, Homo sapiens
FAVCKVCLR

SEQ ID NO: 143942 - protein, 9 aa, Homo sapiens
AVCKVCLRL

SEQ ID NO: 143943 - protein, 9 aa, Homo sapiens
VCKVCLRLL

SEQ ID NO: 143944 - protein, 9 aa, Homo sapiens
CKVCLRLLS

SEQ ID NO: 143945 - protein, 9 aa, Homo sapiens
KVCLRLLSK

SEQ ID NO: 143946 - protein, 9 aa, Homo sapiens
VCLRLLSKI

SEQ ID NO: 143947 - protein, 9 aa, Homo sapiens
CLRLLSKIS

SEQ ID NO: 143948 - protein, 9 aa, Homo sapiens
LRLLSKISE

SEQ ID NO: 143949 - protein, 9 aa, Homo sapiens
RLLSKISEY

SEQ ID NO: 143950 - protein, 9 aa, Homo sapiens
LLSKISEYR

SEQ ID NO: 143951 - protein, 9 aa, Homo sapiens
LSKISEYRH

SEQ ID NO: 143952 - protein, 9 aa, Homo sapiens
SKISEYRHY

SEQ ID NO: 143953 - protein, 9 aa, Homo sapiens
KISEYRHYN

SEQ ID NO: 143954 - protein, 9 aa, Homo sapiens
ISEYRHYNY

SEQ ID NO: 143955 - protein, 9 aa, Homo sapiens
SEYRHYNYS

SEQ ID NO: 143956 - protein, 9 aa, Homo sapiens
EYRHYNYSL

SEQ ID NO: 143957 - protein, 9 aa, Homo sapiens
YRHYNYSLY

SEQ ID NO: 143958 - protein, 9 aa, Homo sapiens
RHYNYSLYG

SEQ ID NO: 143959 - protein, 9 aa, Homo sapiens
HYNYSLYGE

SEQ ID NO: 143960 - protein, 9 aa, Homo sapiens
YNYSLYGET

SEQ ID NO: 143961 - protein, 9 aa, Homo sapiens
NYSLYGETL

SEQ ID NO: 143962 - protein, 9 aa, Homo sapiens
YSLYGETLE

SEQ ID NO: 143963 - protein, 9 aa, Homo sapiens
SLYGETLEQ

SEQ ID NO: 143964 - protein, 9 aa, Homo sapiens
LYGETLEQT

SEQ ID NO: 143965 - protein, 9 aa, Homo sapiens
YGETLEQTL

SEQ ID NO: 143966 - protein, 9 aa, Homo sapiens
GETLEQTLK

SEQ ID NO: 143967 - protein, 9 aa, Homo sapiens
ETLEQTLKK

SEQ ID NO: 143968 - protein, 9 aa, Homo sapiens
TLEQTLKKC

SEQ ID NO: 143969 - protein, 9 aa, Homo sapiens
LEQTLKKCL

SEQ ID NO: 143970 - protein, 9 aa, Homo sapiens
EQTLKKCLN

SEQ ID NO: 143971 - protein, 9 aa, Homo sapiens
QTLKKCLNE

SEQ ID NO: 143972 - protein, 9 aa, Homo sapiens
TLKKCLNEI

SEQ ID NO: 143973 - protein, 9 aa, Homo sapiens
LKKCLNEIL

SEQ ID NO: 143974 - protein, 9 aa, Homo sapiens
KKCLNEILI

SEQ ID NO: 143975 - protein, 9 aa, Homo sapiens
KCLNEILIR

SEQ ID NO: 143976 - protein, 9 aa, Homo sapiens
CLNEILIRC

SEQ ID NO: 143977 - protein, 9 aa, Homo sapiens
LNEILIRCI

SEQ ID NO: 143978 - protein, 9 aa, Homo sapiens
NEILIRCII

SEQ ID NO: 143979 - protein, 9 aa, Homo sapiens
EILIRCIIC

SEQ ID NO: 143980 - protein, 9 aa, Homo sapiens
ILIRCIICQ

SEQ ID NO: 143981 - protein, 9 aa, Homo sapiens
LIRCIICQR

SEQ ID NO: 143982 - protein, 9 aa, Homo sapiens
IRCIICQRP

SEQ ID NO: 143983 - protein, 9 aa, Homo sapiens
RCIICQRPL

SEQ ID NO: 143984 - protein, 9 aa, Homo sapiens
CIICQRPLC

SEQ ID NO: 143985 - protein, 9 aa, Homo sapiens
IICQRPLCP

SEQ ID NO: 143986 - protein, 9 aa, Homo sapiens
ICQRPLCPQ

SEQ ID NO: 143987 - protein, 9 aa, Homo sapiens
CQRPLCPQE

SEQ ID NO: 143988 - protein, 9 aa, Homo sapiens
QRPLCPQEK

SEQ ID NO: 143989 - protein, 9 aa, Homo sapiens
RPLCPQEKK

SEQ ID NO: 143990 - protein, 9 aa, Homo sapiens
PLCPQEKKR

SEQ ID NO: 143991 - protein, 9 aa, Homo sapiens
LCPQEKKRH

SEQ ID NO: 143992 - protein, 9 aa, Homo sapiens
CPQEKKRHV

SEQ ID NO: 143993 - protein, 9 aa, Homo sapiens
PQEKKRHVD

SEQ ID NO: 143994 - protein, 9 aa, Homo sapiens
QEKKRHVDL

SEQ ID NO: 143995 - protein, 9 aa, Homo sapiens
EKKRHVDLN

SEQ ID NO: 143996 - protein, 9 aa, Homo sapiens
KKRHVDLNK

SEQ ID NO: 143997 - protein, 9 aa, Homo sapiens
KRHVDLNKR

SEQ ID NO: 143998 - protein, 9 aa, Homo sapiens
RHVDLNKRF

SEQ ID NO: 143999 - protein, 9 aa, Homo sapiens
HVDLNKRFH

SEQ ID NO: 144000 - protein, 9 aa, Homo sapiens
VDLNKRFHN

SEQ ID NO: 144001 - protein, 9 aa, Homo sapiens
DLNKRFHNI

SEQ ID NO: 144002 - protein, 9 aa, Homo sapiens
LNKRFHNIS

SEQ ID NO: 144003 - protein, 9 aa, Homo sapiens
NKRFHNISG

SEQ ID NO: 144004 - protein, 9 aa, Homo sapiens
KRFHNISGR

SEQ ID NO: 144005 - protein, 9 aa, Homo sapiens
RFHNISGRW

SEQ ID NO: 144006 - protein, 9 aa, Homo sapiens
FHNISGRWT

SEQ ID NO: 144007 - protein, 9 aa, Homo sapiens
HNISGRWTG

SEQ ID NO: 144008 - protein, 9 aa, Homo sapiens
NISGRWTGR

SEQ ID NO: 144009 - protein, 9 aa, Homo sapiens
ISGRWTGRC

SEQ ID NO: 144010 - protein, 9 aa, Homo sapiens
SGRWTGRCA

SEQ ID NO: 144011 - protein, 9 aa, Homo sapiens
GRWTGRCAV

SEQ ID NO: 144012 - protein, 9 aa, Homo sapiens
RWTGRCAVC

SEQ ID NO: 144013 - protein, 9 aa, Homo sapiens
WTGRCAVCW

SEQ ID NO: 144014 - protein, 9 aa, Homo sapiens
TGRCAVCWR

SEQ ID NO: 144015 - protein, 9 aa, Homo sapiens
GRCAVCWRP

SEQ ID NO: 144016 - protein, 9 aa, Homo sapiens
RCAVCWRPR

SEQ ID NO: 144017 - protein, 9 aa, Homo sapiens
CAVCWRPRR

SEQ ID NO: 144018 - protein, 9 aa, Homo sapiens
AVCWRPRRR

SEQ ID NO: 144019 - protein, 9 aa, Homo sapiens
VCWRPRRRQ

SEQ ID NO: 144020 - protein, 9 aa, Homo sapiens
CWRPRRRQT

SEQ ID NO: 144021 - protein, 9 aa, Homo sapiens
WRPRRRQTQ

SEQ ID NO: 144022 - protein, 9 aa, Homo sapiens
RPRRRQTQV

SEQ ID NO: 144023 - protein, 8 aa, Homo sapiens
PRRRQTQV

SEQ ID NO: 144024 - protein, 7 aa, Homo sapiens
RRRQTQV

SEQ ID NO: 144025 - protein, 9 aa, Homo sapiens
MALFHNPEE

SEQ ID NO: 144026 - protein, 9 aa, Homo sapiens
ALFHNPEER

SEQ ID NO: 144027 - protein, 9 aa, Homo sapiens
LFHNPEERP

SEQ ID NO: 144028 - protein, 9 aa, Homo sapiens
FHNPEERPY

SEQ ID NO: 144029 - protein, 9 aa, Homo sapiens
HNPEERPYK

SEQ ID NO: 144030 - protein, 9 aa, Homo sapiens
NPEERPYKL

SEQ ID NO: 144031 - protein, 9 aa, Homo sapiens
PEERPYKLP

SEQ ID NO: 144032 - protein, 9 aa, Homo sapiens
EERPYKLPD

SEQ ID NO: 144033 - protein, 9 aa, Homo sapiens
ERPYKLPDL

SEQ ID NO: 144034 - protein, 9 aa, Homo sapiens
RPYKLPDLC

SEQ ID NO: 144035 - protein, 9 aa, Homo sapiens
PYKLPDLCR

SEQ ID NO: 144036 - protein, 9 aa, Homo sapiens
YKLPDLCRT

SEQ ID NO: 144037 - protein, 9 aa, Homo sapiens
KLPDLCRTL

SEQ ID NO: 144038 - protein, 9 aa, Homo sapiens
LPDLCRTLD

SEQ ID NO: 144039 - protein, 9 aa, Homo sapiens
PDLCRTLDT

SEQ ID NO: 144040 - protein, 9 aa, Homo sapiens
DLCRTLDTT

SEQ ID NO: 144041 - protein, 9 aa, Homo sapiens
LCRTLDTTL

SEQ ID NO: 144042 - protein, 9 aa, Homo sapiens
CRTLDTTLH

SEQ ID NO: 144043 - protein, 9 aa, Homo sapiens
RTLDTTLHD

SEQ ID NO: 144044 - protein, 9 aa, Homo sapiens
TLDTTLHDV

SEQ ID NO: 144045 - protein, 9 aa, Homo sapiens
LDTTLHDVT

SEQ ID NO: 144046 - protein, 9 aa, Homo sapiens
DTTLHDVTI

SEQ ID NO: 144047 - protein, 9 aa, Homo sapiens
TTLHDVTID

SEQ ID NO: 144048 - protein, 9 aa, Homo sapiens
TLHDVTIDC

SEQ ID NO: 144049 - protein, 9 aa, Homo sapiens
LHDVTIDCV

SEQ ID NO: 144050 - protein, 9 aa, Homo sapiens
HDVTIDCVY

SEQ ID NO: 144051 - protein, 9 aa, Homo sapiens
DVTIDCVYC

SEQ ID NO: 144052 - protein, 9 aa, Homo sapiens
VTIDCVYCR

SEQ ID NO: 144053 - protein, 9 aa, Homo sapiens
TIDCVYCRR

SEQ ID NO: 144054 - protein, 9 aa, Homo sapiens
IDCVYCRRQ

SEQ ID NO: 144055 - protein, 9 aa, Homo sapiens
DCVYCRRQL

SEQ ID NO: 144056 - protein, 9 aa, Homo sapiens
CVYCRRQLQ

SEQ ID NO: 144057 - protein, 9 aa, Homo sapiens
VYCRRQLQR

SEQ ID NO: 144058 - protein, 9 aa, Homo sapiens
YCRRQLQRT

SEQ ID NO: 144059 - protein, 9 aa, Homo sapiens
CRRQLQRTE

SEQ ID NO: 144060 - protein, 9 aa, Homo sapiens
RRQLQRTEV

SEQ ID NO: 144061 - protein, 9 aa, Homo sapiens
RQLQRTEVY

SEQ ID NO: 144062 - protein, 9 aa, Homo sapiens
QLQRTEVYE

SEQ ID NO: 144063 - protein, 9 aa, Homo sapiens
LQRTEVYEF

SEQ ID NO: 144064 - protein, 9 aa, Homo sapiens
QRTEVYEFA

SEQ ID NO: 144065 - protein, 9 aa, Homo sapiens
RTEVYEFAF

SEQ ID NO: 144066 - protein, 9 aa, Homo sapiens
TEVYEFAFG

SEQ ID NO: 144067 - protein, 9 aa, Homo sapiens
EVYEFAFGD

SEQ ID NO: 144068 - protein, 9 aa, Homo sapiens
VYEFAFGDL

SEQ ID NO: 144069 - protein, 9 aa, Homo sapiens
YEFAFGDLN

SEQ ID NO: 144070 - protein, 9 aa, Homo sapiens
EFAFGDLNV

SEQ ID NO: 144071 - protein, 9 aa, Homo sapiens
FAFGDLNVV

SEQ ID NO: 144072 - protein, 9 aa, Homo sapiens
AFGDLNVVY

SEQ ID NO: 144073 - protein, 9 aa, Homo sapiens
FGDLNVVYR

SEQ ID NO: 144074 - protein, 9 aa, Homo sapiens
GDLNVVYRD

SEQ ID NO: 144075 - protein, 9 aa, Homo sapiens
DLNVVYRDG

SEQ ID NO: 144076 - protein, 9 aa, Homo sapiens
LNVVYRDGV

SEQ ID NO: 144077 - protein, 9 aa, Homo sapiens
NVVYRDGVP

SEQ ID NO: 144078 - protein, 9 aa, Homo sapiens
VVYRDGVPL

SEQ ID NO: 144079 - protein, 9 aa, Homo sapiens
VYRDGVPLA

SEQ ID NO: 144080 - protein, 9 aa, Homo sapiens
YRDGVPLAA

SEQ ID NO: 144081 - protein, 9 aa, Homo sapiens
RDGVPLAAC

SEQ ID NO: 144082 - protein, 9 aa, Homo sapiens
DGVPLAACQ

SEQ ID NO: 144083 - protein, 9 aa, Homo sapiens
GVPLAACQS

SEQ ID NO: 144084 - protein, 9 aa, Homo sapiens
VPLAACQSC

SEQ ID NO: 144085 - protein, 9 aa, Homo sapiens
PLAACQSCI

SEQ ID NO: 144086 - protein, 9 aa, Homo sapiens
LAACQSCIK

SEQ ID NO: 144087 - protein, 9 aa, Homo sapiens
AACQSCIKF

SEQ ID NO: 144088 - protein, 9 aa, Homo sapiens
ACQSCIKFY

SEQ ID NO: 144089 - protein, 9 aa, Homo sapiens
CQSCIKFYA

SEQ ID NO: 144090 - protein, 9 aa, Homo sapiens
QSCIKFYAK

SEQ ID NO: 144091 - protein, 9 aa, Homo sapiens
SCIKFYAKI

SEQ ID NO: 144092 - protein, 9 aa, Homo sapiens
CIKFYAKIR

SEQ ID NO: 144093 - protein, 9 aa, Homo sapiens
IKFYAKIRE

SEQ ID NO: 144094 - protein, 9 aa, Homo sapiens
KFYAKIREL

SEQ ID NO: 144095 - protein, 9 aa, Homo sapiens
FYAKIRELR

SEQ ID NO: 144096 - protein, 9 aa, Homo sapiens
YAKIRELRY

SEQ ID NO: 144097 - protein, 9 aa, Homo sapiens
AKIRELRYY

SEQ ID NO: 144098 - protein, 9 aa, Homo sapiens
KIRELRYYS

SEQ ID NO: 144099 - protein, 9 aa, Homo sapiens
IRELRYYSE

SEQ ID NO: 144100 - protein, 9 aa, Homo sapiens
RELRYYSES

SEQ ID NO: 144101 - protein, 9 aa, Homo sapiens
ELRYYSESV

SEQ ID NO: 144102 - protein, 9 aa, Homo sapiens
LRYYSESVY

SEQ ID NO: 144103 - protein, 9 aa, Homo sapiens
RYYSESVYA

SEQ ID NO: 144104 - protein, 9 aa, Homo sapiens
YYSESVYAT

SEQ ID NO: 144105 - protein, 9 aa, Homo sapiens
YSESVYATT

SEQ ID NO: 144106 - protein, 9 aa, Homo sapiens
SESVYATTL

SEQ ID NO: 144107 - protein, 9 aa, Homo sapiens
ESVYATTLE

SEQ ID NO: 144108 - protein, 9 aa, Homo sapiens
SVYATTLET

SEQ ID NO: 144109 - protein, 9 aa, Homo sapiens
VYATTLETI

SEQ ID NO: 144110 - protein, 9 aa, Homo sapiens
YATTLETIT

SEQ ID NO: 144111 - protein, 9 aa, Homo sapiens
ATTLETITN

SEQ ID NO: 144112 - protein, 9 aa, Homo sapiens
TTLETITNT

SEQ ID NO: 144113 - protein, 9 aa, Homo sapiens
TLETITNTK

SEQ ID NO: 144114 - protein, 9 aa, Homo sapiens
LETITNTKL

SEQ ID NO: 144115 - protein, 9 aa, Homo sapiens
ETITNTKLY

SEQ ID NO: 144116 - protein, 9 aa, Homo sapiens
TITNTKLYD

SEQ ID NO: 144117 - protein, 9 aa, Homo sapiens
ITNTKLYDL

SEQ ID NO: 144118 - protein, 9 aa, Homo sapiens
TNTKLYDLS

SEQ ID NO: 144119 - protein, 9 aa, Homo sapiens
NTKLYDLSI

SEQ ID NO: 144120 - protein, 9 aa, Homo sapiens
TKLYDLSIR

SEQ ID NO: 144121 - protein, 9 aa, Homo sapiens
KLYDLSIRC

SEQ ID NO: 144122 - protein, 9 aa, Homo sapiens
LYDLSIRCM

SEQ ID NO: 144123 - protein, 9 aa, Homo sapiens
YDLSIRCMC

SEQ ID NO: 144124 - protein, 9 aa, Homo sapiens
DLSIRCMCC

SEQ ID NO: 144125 - protein, 9 aa, Homo sapiens
LSIRCMCCL

SEQ ID NO: 144126 - protein, 9 aa, Homo sapiens
SIRCMCCLK

SEQ ID NO: 144127 - protein, 9 aa, Homo sapiens
IRCMCCLKP

SEQ ID NO: 144128 - protein, 9 aa, Homo sapiens
RCMCCLKPL

SEQ ID NO: 144129 - protein, 9 aa, Homo sapiens
CMCCLKPLS

SEQ ID NO: 144130 - protein, 9 aa, Homo sapiens
MCCLKPLSP

SEQ ID NO: 144131 - protein, 9 aa, Homo sapiens
CCLKPLSPA

SEQ ID NO: 144132 - protein, 9 aa, Homo sapiens
CLKPLSPAE

SEQ ID NO: 144133 - protein, 9 aa, Homo sapiens
LKPLSPAEK

SEQ ID NO: 144134 - protein, 9 aa, Homo sapiens
KPLSPAEKL

SEQ ID NO: 144135 - protein, 9 aa, Homo sapiens
PLSPAEKLR

SEQ ID NO: 144136 - protein, 9 aa, Homo sapiens
LSPAEKLRH

SEQ ID NO: 144137 - protein, 9 aa, Homo sapiens
SPAEKLRHL

SEQ ID NO: 144138 - protein, 9 aa, Homo sapiens
PAEKLRHLN

SEQ ID NO: 144139 - protein, 9 aa, Homo sapiens
AEKLRHLNS

SEQ ID NO: 144140 - protein, 9 aa, Homo sapiens
EKLRHLNSK

SEQ ID NO: 144141 - protein, 9 aa, Homo sapiens
KLRHLNSKR

SEQ ID NO: 144142 - protein, 9 aa, Homo sapiens
LRHLNSKRR

SEQ ID NO: 144143 - protein, 9 aa, Homo sapiens
RHLNSKRRF

SEQ ID NO: 144144 - protein, 9 aa, Homo sapiens
HLNSKRRFH

SEQ ID NO: 144145 - protein, 9 aa, Homo sapiens
LNSKRRFHK

SEQ ID NO: 144146 - protein, 9 aa, Homo sapiens
NSKRRFHKI

SEQ ID NO: 144147 - protein, 9 aa, Homo sapiens
SKRRFHKIA

SEQ ID NO: 144148 - protein, 9 aa, Homo sapiens
KRRFHKIAG

SEQ ID NO: 144149 - protein, 9 aa, Homo sapiens
RRFHKIAGN

SEQ ID NO: 144150 - protein, 9 aa, Homo sapiens
RFHKIAGNF

SEQ ID NO: 144151 - protein, 9 aa, Homo sapiens
FHKIAGNFT

SEQ ID NO: 144152 - protein, 9 aa, Homo sapiens
HKIAGNFTG

SEQ ID NO: 144153 - protein, 9 aa, Homo sapiens
KIAGNFTGQ

SEQ ID NO: 144154 - protein, 9 aa, Homo sapiens
IAGNFTGQC

SEQ ID NO: 144155 - protein, 9 aa, Homo sapiens
AGNFTGQCR

SEQ ID NO: 144156 - protein, 9 aa, Homo sapiens
GNFTGQCRH

SEQ ID NO: 144157 - protein, 9 aa, Homo sapiens
NFTGQCRHC

SEQ ID NO: 144158 - protein, 9 aa, Homo sapiens
FTGQCRHCW

SEQ ID NO: 144159 - protein, 9 aa, Homo sapiens
TGQCRHCWT

SEQ ID NO: 144160 - protein, 9 aa, Homo sapiens
GQCRHCWTS

SEQ ID NO: 144161 - protein, 9 aa, Homo sapiens
QCRHCWTSK

SEQ ID NO: 144162 - protein, 9 aa, Homo sapiens
CRHCWTSKR

SEQ ID NO: 144163 - protein, 9 aa, Homo sapiens
RHCWTSKRE

SEQ ID NO: 144164 - protein, 9 aa, Homo sapiens
HCWTSKRED

SEQ ID NO: 144165 - protein, 9 aa, Homo sapiens
CWTSKREDR

SEQ ID NO: 144166 - protein, 9 aa, Homo sapiens
WTSKREDRR

SEQ ID NO: 144167 - protein, 9 aa, Homo sapiens
TSKREDRRR

SEQ ID NO: 144168 - protein, 9 aa, Homo sapiens
SKREDRRRT

SEQ ID NO: 144169 - protein, 9 aa, Homo sapiens
KREDRRRTR

SEQ ID NO: 144170 - protein, 9 aa, Homo sapiens
REDRRRTRQ

SEQ ID NO: 144171 - protein, 9 aa, Homo sapiens
EDRRRTRQE

SEQ ID NO: 144172 - protein, 9 aa, Homo sapiens
DRRRTRQET

SEQ ID NO: 144173 - protein, 9 aa, Homo sapiens
RRRTRQETQ

SEQ ID NO: 144174 - protein, 9 aa, Homo sapiens
RRTRQETQV

SEQ ID NO: 144175 - protein, 8 aa, Homo sapiens
RTRQETQV

SEQ ID NO: 144176 - protein, 7 aa, Homo sapiens
TRQETQV

SEQ ID NO: 144177 - protein, 9 aa, Homo sapiens
MALFHNPEE

SEQ ID NO: 144178 - protein, 9 aa, Homo sapiens
ALFHNPEER

SEQ ID NO: 144179 - protein, 9 aa, Homo sapiens
LFHNPEERP

SEQ ID NO: 144180 - protein, 9 aa, Homo sapiens
FHNPEERPY

SEQ ID NO: 144181 - protein, 9 aa, Homo sapiens
HNPEERPYK

SEQ ID NO: 144182 - protein, 9 aa, Homo sapiens
NPEERPYKL

SEQ ID NO: 144183 - protein, 9 aa, Homo sapiens
PEERPYKLP

SEQ ID NO: 144184 - protein, 9 aa, Homo sapiens
EERPYKLPD

SEQ ID NO: 144185 - protein, 9 aa, Homo sapiens
ERPYKLPDL

SEQ ID NO: 144186 - protein, 9 aa, Homo sapiens
RPYKLPDLC

SEQ ID NO: 144187 - protein, 9 aa, Homo sapiens
PYKLPDLCR

SEQ ID NO: 144188 - protein, 9 aa, Homo sapiens
YKLPDLCRT

SEQ ID NO: 144189 - protein, 9 aa, Homo sapiens
KLPDLCRTL

SEQ ID NO: 144190 - protein, 9 aa, Homo sapiens
LPDLCRTLD

SEQ ID NO: 144191 - protein, 9 aa, Homo sapiens
PDLCRTLDT

SEQ ID NO: 144192 - protein, 9 aa, Homo sapiens
DLCRTLDTT

SEQ ID NO: 144193 - protein, 9 aa, Homo sapiens
LCRTLDTTL

SEQ ID NO: 144194 - protein, 9 aa, Homo sapiens
CRTLDTTLH

SEQ ID NO: 144195 - protein, 9 aa, Homo sapiens
RTLDTTLHD

SEQ ID NO: 144196 - protein, 9 aa, Homo sapiens
TLDTTLHDV

SEQ ID NO: 144197 - protein, 9 aa, Homo sapiens
LDTTLHDVT

SEQ ID NO: 144198 - protein, 9 aa, Homo sapiens
DTTLHDVTI

SEQ ID NO: 144199 - protein, 9 aa, Homo sapiens
TTLHDVTID

SEQ ID NO: 144200 - protein, 9 aa, Homo sapiens
TLHDVTIDC

SEQ ID NO: 144201 - protein, 9 aa, Homo sapiens
LHDVTIDCV

SEQ ID NO: 144202 - protein, 9 aa, Homo sapiens
HDVTIDCVY

SEQ ID NO: 144203 - protein, 9 aa, Homo sapiens
DVTIDCVYC

SEQ ID NO: 144204 - protein, 9 aa, Homo sapiens
VTIDCVYCR

SEQ ID NO: 144205 - protein, 9 aa, Homo sapiens
TIDCVYCRR

SEQ ID NO: 144206 - protein, 9 aa, Homo sapiens
IDCVYCRRQ

SEQ ID NO: 144207 - protein, 9 aa, Homo sapiens
DCVYCRRQL

SEQ ID NO: 144208 - protein, 9 aa, Homo sapiens
CVYCRRQLQ

SEQ ID NO: 144209 - protein, 9 aa, Homo sapiens
VYCRRQLQR

SEQ ID NO: 144210 - protein, 9 aa, Homo sapiens
YCRRQLQRT

SEQ ID NO: 144211 - protein, 9 aa, Homo sapiens
CRRQLQRTE

SEQ ID NO: 144212 - protein, 9 aa, Homo sapiens
RRQLQRTEV

SEQ ID NO: 144213 - protein, 9 aa, Homo sapiens
RQLQRTEVY

SEQ ID NO: 144214 - protein, 9 aa, Homo sapiens
QLQRTEVYE

SEQ ID NO: 144215 - protein, 9 aa, Homo sapiens
LQRTEVYEF

SEQ ID NO: 144216 - protein, 9 aa, Homo sapiens
QRTEVYEFA

SEQ ID NO: 144217 - protein, 9 aa, Homo sapiens
RTEVYEFAF

SEQ ID NO: 144218 - protein, 9 aa, Homo sapiens
TEVYEFAFG

SEQ ID NO: 144219 - protein, 9 aa, Homo sapiens
EVYEFAFGD

SEQ ID NO: 144220 - protein, 9 aa, Homo sapiens
VYEFAFGDL

SEQ ID NO: 144221 - protein, 9 aa, Homo sapiens
YEFAFGDLN

SEQ ID NO: 144222 - protein, 9 aa, Homo sapiens
EFAFGDLNV

SEQ ID NO: 144223 - protein, 9 aa, Homo sapiens
FAFGDLNVV

SEQ ID NO: 144224 - protein, 9 aa, Homo sapiens
AFGDLNVVY

SEQ ID NO: 144225 - protein, 9 aa, Homo sapiens
FGDLNVVYR

SEQ ID NO: 144226 - protein, 9 aa, Homo sapiens
GDLNVVYRD

SEQ ID NO: 144227 - protein, 9 aa, Homo sapiens
DLNVVYRDG

SEQ ID NO: 144228 - protein, 9 aa, Homo sapiens
LNVVYRDGV

SEQ ID NO: 144229 - protein, 9 aa, Homo sapiens
NVVYRDGVP

SEQ ID NO: 144230 - protein, 9 aa, Homo sapiens
VVYRDGVPL

SEQ ID NO: 144231 - protein, 9 aa, Homo sapiens
VYRDGVPLA

SEQ ID NO: 144232 - protein, 9 aa, Homo sapiens
YRDGVPLAA

SEQ ID NO: 144233 - protein, 9 aa, Homo sapiens
RDGVPLAAC

SEQ ID NO: 144234 - protein, 9 aa, Homo sapiens
DGVPLAACQ

SEQ ID NO: 144235 - protein, 9 aa, Homo sapiens
GVPLAACQS

SEQ ID NO: 144236 - protein, 9 aa, Homo sapiens
VPLAACQSC

SEQ ID NO: 144237 - protein, 9 aa, Homo sapiens
PLAACQSCI

SEQ ID NO: 144238 - protein, 9 aa, Homo sapiens
LAACQSCIK

SEQ ID NO: 144239 - protein, 9 aa, Homo sapiens
AACQSCIKF

SEQ ID NO: 144240 - protein, 9 aa, Homo sapiens
ACQSCIKFY

SEQ ID NO: 144241 - protein, 9 aa, Homo sapiens
CQSCIKFYA

SEQ ID NO: 144242 - protein, 9 aa, Homo sapiens
QSCIKFYAK

SEQ ID NO: 144243 - protein, 9 aa, Homo sapiens
SCIKFYAKI

SEQ ID NO: 144244 - protein, 9 aa, Homo sapiens
CIKFYAKIR

SEQ ID NO: 144245 - protein, 9 aa, Homo sapiens
IKFYAKIRE

SEQ ID NO: 144246 - protein, 9 aa, Homo sapiens
KFYAKIREL

SEQ ID NO: 144247 - protein, 9 aa, Homo sapiens
FYAKIRELR

SEQ ID NO: 144248 - protein, 9 aa, Homo sapiens
YAKIRELRY

SEQ ID NO: 144249 - protein, 9 aa, Homo sapiens
AKIRELRYY

SEQ ID NO: 144250 - protein, 9 aa, Homo sapiens
KIRELRYYS

SEQ ID NO: 144251 - protein, 9 aa, Homo sapiens
IRELRYYSE

SEQ ID NO: 144252 - protein, 9 aa, Homo sapiens
RELRYYSES

SEQ ID NO: 144253 - protein, 9 aa, Homo sapiens
ELRYYSESV

SEQ ID NO: 144254 - protein, 9 aa, Homo sapiens
LRYYSESVY

SEQ ID NO: 144255 - protein, 9 aa, Homo sapiens
RYYSESVYA

SEQ ID NO: 144256 - protein, 9 aa, Homo sapiens
YYSESVYAT

SEQ ID NO: 144257 - protein, 9 aa, Homo sapiens
YSESVYATT

SEQ ID NO: 144258 - protein, 9 aa, Homo sapiens
SESVYATTL

SEQ ID NO: 144259 - protein, 9 aa, Homo sapiens
ESVYATTLE

SEQ ID NO: 144260 - protein, 9 aa, Homo sapiens
SVYATTLET

SEQ ID NO: 144261 - protein, 9 aa, Homo sapiens
VYATTLETI

SEQ ID NO: 144262 - protein, 9 aa, Homo sapiens
YATTLETIT

SEQ ID NO: 144263 - protein, 9 aa, Homo sapiens
ATTLETITN

SEQ ID NO: 144264 - protein, 9 aa, Homo sapiens
TTLETITNT

SEQ ID NO: 144265 - protein, 9 aa, Homo sapiens
TLETITNTK

SEQ ID NO: 144266 - protein, 9 aa, Homo sapiens
LETITNTKL

SEQ ID NO: 144267 - protein, 9 aa, Homo sapiens
ETITNTKLY

SEQ ID NO: 144268 - protein, 9 aa, Homo sapiens
TITNTKLYD

SEQ ID NO: 144269 - protein, 9 aa, Homo sapiens
ITNTKLYDL

SEQ ID NO: 144270 - protein, 9 aa, Homo sapiens
TNTKLYDLS

SEQ ID NO: 144271 - protein, 9 aa, Homo sapiens
NTKLYDLSI

SEQ ID NO: 144272 - protein, 9 aa, Homo sapiens
TKLYDLSIR

SEQ ID NO: 144273 - protein, 9 aa, Homo sapiens
KLYDLSIRC

SEQ ID NO: 144274 - protein, 9 aa, Homo sapiens
LYDLSIRCM

SEQ ID NO: 144275 - protein, 9 aa, Homo sapiens
YDLSIRCMC

SEQ ID NO: 144276 - protein, 9 aa, Homo sapiens
DLSIRCMCC

SEQ ID NO: 144277 - protein, 9 aa, Homo sapiens
LSIRCMCCL

SEQ ID NO: 144278 - protein, 9 aa, Homo sapiens
SIRCMCCLK

SEQ ID NO: 144279 - protein, 9 aa, Homo sapiens
IRCMCCLKP

SEQ ID NO: 144280 - protein, 9 aa, Homo sapiens
RCMCCLKPL

SEQ ID NO: 144281 - protein, 9 aa, Homo sapiens
CMCCLKPLS

SEQ ID NO: 144282 - protein, 9 aa, Homo sapiens
MCCLKPLSP

SEQ ID NO: 144283 - protein, 9 aa, Homo sapiens
CCLKPLSPA

SEQ ID NO: 144284 - protein, 9 aa, Homo sapiens
CLKPLSPAE

SEQ ID NO: 144285 - protein, 9 aa, Homo sapiens
LKPLSPAEK

SEQ ID NO: 144286 - protein, 9 aa, Homo sapiens
KPLSPAEKL

SEQ ID NO: 144287 - protein, 9 aa, Homo sapiens
PLSPAEKLR

SEQ ID NO: 144288 - protein, 9 aa, Homo sapiens
LSPAEKLRH

SEQ ID NO: 144289 - protein, 9 aa, Homo sapiens
SPAEKLRHL

SEQ ID NO: 144290 - protein, 9 aa, Homo sapiens
PAEKLRHLN

SEQ ID NO: 144291 - protein, 9 aa, Homo sapiens
AEKLRHLNS

SEQ ID NO: 144292 - protein, 9 aa, Homo sapiens
EKLRHLNSK

SEQ ID NO: 144293 - protein, 9 aa, Homo sapiens
KLRHLNSKR

SEQ ID NO: 144294 - protein, 9 aa, Homo sapiens
LRHLNSKRR

SEQ ID NO: 144295 - protein, 9 aa, Homo sapiens
RHLNSKRRF

SEQ ID NO: 144296 - protein, 9 aa, Homo sapiens
HLNSKRRFH

SEQ ID NO: 144297 - protein, 9 aa, Homo sapiens
LNSKRRFHK

SEQ ID NO: 144298 - protein, 9 aa, Homo sapiens
NSKRRFHKI

SEQ ID NO: 144299 - protein, 9 aa, Homo sapiens
SKRRFHKIA

SEQ ID NO: 144300 - protein, 9 aa, Homo sapiens
KRRFHKIAG

SEQ ID NO: 144301 - protein, 9 aa, Homo sapiens
RRFHKIAGN

SEQ ID NO: 144302 - protein, 9 aa, Homo sapiens
RFHKIAGNF

SEQ ID NO: 144303 - protein, 9 aa, Homo sapiens
FHKIAGNFT

SEQ ID NO: 144304 - protein, 9 aa, Homo sapiens
HKIAGNFTG

SEQ ID NO: 144305 - protein, 9 aa, Homo sapiens
KIAGNFTGQ

SEQ ID NO: 144306 - protein, 9 aa, Homo sapiens
IAGNFTGQC

SEQ ID NO: 144307 - protein, 9 aa, Homo sapiens
AGNFTGQCR

SEQ ID NO: 144308 - protein, 9 aa, Homo sapiens
GNFTGQCRH

SEQ ID NO: 144309 - protein, 9 aa, Homo sapiens
NFTGQCRHC

SEQ ID NO: 144310 - protein, 9 aa, Homo sapiens
FTGQCRHCW

SEQ ID NO: 144311 - protein, 9 aa, Homo sapiens
TGQCRHCWT

SEQ ID NO: 144312 - protein, 9 aa, Homo sapiens
GQCRHCWTS

SEQ ID NO: 144313 - protein, 9 aa, Homo sapiens
QCRHCWTSK

SEQ ID NO: 144314 - protein, 9 aa, Homo sapiens
CRHCWTSKR

SEQ ID NO: 144315 - protein, 9 aa, Homo sapiens
RHCWTSKRE

SEQ ID NO: 144316 - protein, 9 aa, Homo sapiens
HCWTSKRED

SEQ ID NO: 144317 - protein, 9 aa, Homo sapiens
CWTSKREDR

SEQ ID NO: 144318 - protein, 9 aa, Homo sapiens
WTSKREDRR

SEQ ID NO: 144319 - protein, 9 aa, Homo sapiens
TSKREDRRR

SEQ ID NO: 144320 - protein, 9 aa, Homo sapiens
SKREDRRRT

SEQ ID NO: 144321 - protein, 9 aa, Homo sapiens
KREDRRRTR

SEQ ID NO: 144322 - protein, 9 aa, Homo sapiens
REDRRRTRQ

SEQ ID NO: 144323 - protein, 9 aa, Homo sapiens
EDRRRTRQE

SEQ ID NO: 144324 - protein, 9 aa, Homo sapiens
DRRRTRQET

SEQ ID NO: 144325 - protein, 9 aa, Homo sapiens
RRRTRQETQ

SEQ ID NO: 144326 - protein, 9 aa, Homo sapiens
RRTRQETQV

SEQ ID NO: 144327 - protein, 8 aa, Homo sapiens
RTRQETQV

SEQ ID NO: 144328 - protein, 7 aa, Homo sapiens
TRQETQV

SEQ ID NO: 144329 - protein, 9 aa, Homo sapiens
MARPKPLTV

SEQ ID NO: 144330 - protein, 9 aa, Homo sapiens
ARPKPLTVQ

SEQ ID NO: 144331 - protein, 9 aa, Homo sapiens
RPKPLTVQQ

SEQ ID NO: 144332 - protein, 9 aa, Homo sapiens
PKPLTVQQL

SEQ ID NO: 144333 - protein, 9 aa, Homo sapiens
KPLTVQQLA

SEQ ID NO: 144334 - protein, 9 aa, Homo sapiens
PLTVQQLAD

SEQ ID NO: 144335 - protein, 9 aa, Homo sapiens
LTVQQLADT

SEQ ID NO: 144336 - protein, 9 aa, Homo sapiens
TVQQLADTL

SEQ ID NO: 144337 - protein, 9 aa, Homo sapiens
VQQLADTLC

SEQ ID NO: 144338 - protein, 9 aa, Homo sapiens
QQLADTLCI

SEQ ID NO: 144339 - protein, 9 aa, Homo sapiens
QLADTLCIP

SEQ ID NO: 144340 - protein, 9 aa, Homo sapiens
LADTLCIPV

SEQ ID NO: 144341 - protein, 9 aa, Homo sapiens
ADTLCIPVL

SEQ ID NO: 144342 - protein, 9 aa, Homo sapiens
DTLCIPVLD

SEQ ID NO: 144343 - protein, 9 aa, Homo sapiens
TLCIPVLDI

SEQ ID NO: 144344 - protein, 9 aa, Homo sapiens
LCIPVLDIL

SEQ ID NO: 144345 - protein, 9 aa, Homo sapiens
CIPVLDILI

SEQ ID NO: 144346 - protein, 9 aa, Homo sapiens
IPVLDILIP

SEQ ID NO: 144347 - protein, 9 aa, Homo sapiens
PVLDILIPC

SEQ ID NO: 144348 - protein, 9 aa, Homo sapiens
VLDILIPCR

SEQ ID NO: 144349 - protein, 9 aa, Homo sapiens
LDILIPCRF

SEQ ID NO: 144350 - protein, 9 aa, Homo sapiens
DILIPCRFC

SEQ ID NO: 144351 - protein, 9 aa, Homo sapiens
ILIPCRFCT

SEQ ID NO: 144352 - protein, 9 aa, Homo sapiens
LIPCRFCTR

SEQ ID NO: 144353 - protein, 9 aa, Homo sapiens
IPCRFCTRF

SEQ ID NO: 144354 - protein, 9 aa, Homo sapiens
PCRFCTRFL

SEQ ID NO: 144355 - protein, 9 aa, Homo sapiens
CRFCTRFLS

SEQ ID NO: 144356 - protein, 9 aa, Homo sapiens
RFCTRFLSY

SEQ ID NO: 144357 - protein, 9 aa, Homo sapiens
FCTRFLSYI

SEQ ID NO: 144358 - protein, 9 aa, Homo sapiens
CTRFLSYIE

SEQ ID NO: 144359 - protein, 9 aa, Homo sapiens
TRFLSYIEL

SEQ ID NO: 144360 - protein, 9 aa, Homo sapiens
RFLSYIELL

SEQ ID NO: 144361 - protein, 9 aa, Homo sapiens
FLSYIELLG

SEQ ID NO: 144362 - protein, 9 aa, Homo sapiens
LSYIELLGF

SEQ ID NO: 144363 - protein, 9 aa, Homo sapiens
SYIELLGFD

SEQ ID NO: 144364 - protein, 9 aa, Homo sapiens
YIELLGFDY

SEQ ID NO: 144365 - protein, 9 aa, Homo sapiens
IELLGFDYK

SEQ ID NO: 144366 - protein, 9 aa, Homo sapiens
ELLGFDYKG

SEQ ID NO: 144367 - protein, 9 aa, Homo sapiens
LLGFDYKGL

SEQ ID NO: 144368 - protein, 9 aa, Homo sapiens
LGFDYKGLQ

SEQ ID NO: 144369 - protein, 9 aa, Homo sapiens
GFDYKGLQL

SEQ ID NO: 144370 - protein, 9 aa, Homo sapiens
FDYKGLQLI

SEQ ID NO: 144371 - protein, 9 aa, Homo sapiens
DYKGLQLIW

SEQ ID NO: 144372 - protein, 9 aa, Homo sapiens
YKGLQLIWT

SEQ ID NO: 144373 - protein, 9 aa, Homo sapiens
KGLQLIWTE

SEQ ID NO: 144374 - protein, 9 aa, Homo sapiens
GLQLIWTEE

SEQ ID NO: 144375 - protein, 9 aa, Homo sapiens
LQLIWTEED

SEQ ID NO: 144376 - protein, 9 aa, Homo sapiens
QLIWTEEDF

SEQ ID NO: 144377 - protein, 9 aa, Homo sapiens
LIWTEEDFV

SEQ ID NO: 144378 - protein, 9 aa, Homo sapiens
IWTEEDFVF

SEQ ID NO: 144379 - protein, 9 aa, Homo sapiens
WTEEDFVFA

SEQ ID NO: 144380 - protein, 9 aa, Homo sapiens
TEEDFVFAC

SEQ ID NO: 144381 - protein, 9 aa, Homo sapiens
EEDFVFACC

SEQ ID NO: 144382 - protein, 9 aa, Homo sapiens
EDFVFACCS

SEQ ID NO: 144383 - protein, 9 aa, Homo sapiens
DFVFACCSS

SEQ ID NO: 144384 - protein, 9 aa, Homo sapiens
FVFACCSSC

SEQ ID NO: 144385 - protein, 9 aa, Homo sapiens
VFACCSSCA

SEQ ID NO: 144386 - protein, 9 aa, Homo sapiens
FACCSSCAH

SEQ ID NO: 144387 - protein, 9 aa, Homo sapiens
ACCSSCAHA

SEQ ID NO: 144388 - protein, 9 aa, Homo sapiens
CCSSCAHAT

SEQ ID NO: 144389 - protein, 9 aa, Homo sapiens
CSSCAHATA

SEQ ID NO: 144390 - protein, 9 aa, Homo sapiens
SSCAHATAQ

SEQ ID NO: 144391 - protein, 9 aa, Homo sapiens
SCAHATAQY

SEQ ID NO: 144392 - protein, 9 aa, Homo sapiens
CAHATAQYE

SEQ ID NO: 144393 - protein, 9 aa, Homo sapiens
AHATAQYEF

SEQ ID NO: 144394 - protein, 9 aa, Homo sapiens
HATAQYEFT

SEQ ID NO: 144395 - protein, 9 aa, Homo sapiens
ATAQYEFTR

SEQ ID NO: 144396 - protein, 9 aa, Homo sapiens
TAQYEFTRF

SEQ ID NO: 144397 - protein, 9 aa, Homo sapiens
AQYEFTRFY

SEQ ID NO: 144398 - protein, 9 aa, Homo sapiens
QYEFTRFYE

SEQ ID NO: 144399 - protein, 9 aa, Homo sapiens
YEFTRFYEH

SEQ ID NO: 144400 - protein, 9 aa, Homo sapiens
EFTRFYEHS

SEQ ID NO: 144401 - protein, 9 aa, Homo sapiens
FTRFYEHSV

SEQ ID NO: 144402 - protein, 9 aa, Homo sapiens
TRFYEHSVN

SEQ ID NO: 144403 - protein, 9 aa, Homo sapiens
RFYEHSVNG

SEQ ID NO: 144404 - protein, 9 aa, Homo sapiens
FYEHSVNGR

SEQ ID NO: 144405 - protein, 9 aa, Homo sapiens
YEHSVNGRE

SEQ ID NO: 144406 - protein, 9 aa, Homo sapiens
EHSVNGREI

SEQ ID NO: 144407 - protein, 9 aa, Homo sapiens
HSVNGREIE

SEQ ID NO: 144408 - protein, 9 aa, Homo sapiens
SVNGREIEI

SEQ ID NO: 144409 - protein, 9 aa, Homo sapiens
VNGREIEIV

SEQ ID NO: 144410 - protein, 9 aa, Homo sapiens
NGREIEIVE

SEQ ID NO: 144411 - protein, 9 aa, Homo sapiens
GREIEIVEQ

SEQ ID NO: 144412 - protein, 9 aa, Homo sapiens
REIEIVEQK

SEQ ID NO: 144413 - protein, 9 aa, Homo sapiens
EIEIVEQKG

SEQ ID NO: 144414 - protein, 9 aa, Homo sapiens
IEIVEQKGI

SEQ ID NO: 144415 - protein, 9 aa, Homo sapiens
EIVEQKGIG

SEQ ID NO: 144416 - protein, 9 aa, Homo sapiens
IVEQKGIGE

SEQ ID NO: 144417 - protein, 9 aa, Homo sapiens
VEQKGIGEV

SEQ ID NO: 144418 - protein, 9 aa, Homo sapiens
EQKGIGEVV

SEQ ID NO: 144419 - protein, 9 aa, Homo sapiens
QKGIGEVVV

SEQ ID NO: 144420 - protein, 9 aa, Homo sapiens
KGIGEVVVR

SEQ ID NO: 144421 - protein, 9 aa, Homo sapiens
GIGEVVVRC

SEQ ID NO: 144422 - protein, 9 aa, Homo sapiens
IGEVVVRCQ

SEQ ID NO: 144423 - protein, 9 aa, Homo sapiens
GEVVVRCQY

SEQ ID NO: 144424 - protein, 9 aa, Homo sapiens
EVVVRCQYC

SEQ ID NO: 144425 - protein, 9 aa, Homo sapiens
VVVRCQYCL

SEQ ID NO: 144426 - protein, 9 aa, Homo sapiens
VVRCQYCLK

SEQ ID NO: 144427 - protein, 9 aa, Homo sapiens
VRCQYCLKR

SEQ ID NO: 144428 - protein, 9 aa, Homo sapiens
RCQYCLKRL

SEQ ID NO: 144429 - protein, 9 aa, Homo sapiens
CQYCLKRLD

SEQ ID NO: 144430 - protein, 9 aa, Homo sapiens
QYCLKRLDL

SEQ ID NO: 144431 - protein, 9 aa, Homo sapiens
YCLKRLDLI

SEQ ID NO: 144432 - protein, 9 aa, Homo sapiens
CLKRLDLIE

SEQ ID NO: 144433 - protein, 9 aa, Homo sapiens
LKRLDLIEK

SEQ ID NO: 144434 - protein, 9 aa, Homo sapiens
KRLDLIEKL

SEQ ID NO: 144435 - protein, 9 aa, Homo sapiens
RLDLIEKLE

SEQ ID NO: 144436 - protein, 9 aa, Homo sapiens
LDLIEKLEV

SEQ ID NO: 144437 - protein, 9 aa, Homo sapiens
DLIEKLEVC

SEQ ID NO: 144438 - protein, 9 aa, Homo sapiens
LIEKLEVCC

SEQ ID NO: 144439 - protein, 9 aa, Homo sapiens
IEKLEVCCK

SEQ ID NO: 144440 - protein, 9 aa, Homo sapiens
EKLEVCCKH

SEQ ID NO: 144441 - protein, 9 aa, Homo sapiens
KLEVCCKHQ

SEQ ID NO: 144442 - protein, 9 aa, Homo sapiens
LEVCCKHQQ

SEQ ID NO: 144443 - protein, 9 aa, Homo sapiens
EVCCKHQQF

SEQ ID NO: 144444 - protein, 9 aa, Homo sapiens
VCCKHQQFH

SEQ ID NO: 144445 - protein, 9 aa, Homo sapiens
CCKHQQFHR

SEQ ID NO: 144446 - protein, 9 aa, Homo sapiens
CKHQQFHRV

SEQ ID NO: 144447 - protein, 9 aa, Homo sapiens
KHQQFHRVR

SEQ ID NO: 144448 - protein, 9 aa, Homo sapiens
HQQFHRVRG

SEQ ID NO: 144449 - protein, 9 aa, Homo sapiens
QQFHRVRGN

SEQ ID NO: 144450 - protein, 9 aa, Homo sapiens
QFHRVRGNW

SEQ ID NO: 144451 - protein, 9 aa, Homo sapiens
FHRVRGNWK

SEQ ID NO: 144452 - protein, 9 aa, Homo sapiens
HRVRGNWKG

SEQ ID NO: 144453 - protein, 9 aa, Homo sapiens
RVRGNWKGV

SEQ ID NO: 144454 - protein, 9 aa, Homo sapiens
VRGNWKGVC

SEQ ID NO: 144455 - protein, 9 aa, Homo sapiens
RGNWKGVCR

SEQ ID NO: 144456 - protein, 9 aa, Homo sapiens
GNWKGVCRH

SEQ ID NO: 144457 - protein, 9 aa, Homo sapiens
NWKGVCRHC

SEQ ID NO: 144458 - protein, 9 aa, Homo sapiens
WKGVCRHCG

SEQ ID NO: 144459 - protein, 9 aa, Homo sapiens
KGVCRHCGS

SEQ ID NO: 144460 - protein, 9 aa, Homo sapiens
GVCRHCGSI

SEQ ID NO: 144461 - protein, 9 aa, Homo sapiens
VCRHCGSIG

SEQ ID NO: 144462 - protein, 8 aa, Homo sapiens
CRHCGSIG

SEQ ID NO: 144463 - protein, 7 aa, Homo sapiens
RHCGSIG

SEQ ID NO: 144464 - protein, 9 aa, Homo sapiens
MDRPKPRTV

SEQ ID NO: 144465 - protein, 9 aa, Homo sapiens
DRPKPRTVK

SEQ ID NO: 144466 - protein, 9 aa, Homo sapiens
RPKPRTVKE

SEQ ID NO: 144467 - protein, 9 aa, Homo sapiens
PKPRTVKEL

SEQ ID NO: 144468 - protein, 9 aa, Homo sapiens
KPRTVKELA

SEQ ID NO: 144469 - protein, 9 aa, Homo sapiens
PRTVKELAD

SEQ ID NO: 144470 - protein, 9 aa, Homo sapiens
RTVKELADT

SEQ ID NO: 144471 - protein, 9 aa, Homo sapiens
TVKELADTL

SEQ ID NO: 144472 - protein, 9 aa, Homo sapiens
VKELADTLA

SEQ ID NO: 144473 - protein, 9 aa, Homo sapiens
KELADTLAI

SEQ ID NO: 144474 - protein, 9 aa, Homo sapiens
ELADTLAIP

SEQ ID NO: 144475 - protein, 9 aa, Homo sapiens
LADTLAIPV

SEQ ID NO: 144476 - protein, 9 aa, Homo sapiens
ADTLAIPVI

SEQ ID NO: 144477 - protein, 9 aa, Homo sapiens
DTLAIPVID

SEQ ID NO: 144478 - protein, 9 aa, Homo sapiens
TLAIPVIDL

SEQ ID NO: 144479 - protein, 9 aa, Homo sapiens
LAIPVIDLL

SEQ ID NO: 144480 - protein, 9 aa, Homo sapiens
AIPVIDLLL

SEQ ID NO: 144481 - protein, 9 aa, Homo sapiens
IPVIDLLLP

SEQ ID NO: 144482 - protein, 9 aa, Homo sapiens
PVIDLLLPC

SEQ ID NO: 144483 - protein, 9 aa, Homo sapiens
VIDLLLPCN

SEQ ID NO: 144484 - protein, 9 aa, Homo sapiens
IDLLLPCNF

SEQ ID NO: 144485 - protein, 9 aa, Homo sapiens
DLLLPCNFC

SEQ ID NO: 144486 - protein, 9 aa, Homo sapiens
LLLPCNFCN

SEQ ID NO: 144487 - protein, 9 aa, Homo sapiens
LLPCNFCNR

SEQ ID NO: 144488 - protein, 9 aa, Homo sapiens
LPCNFCNRF

SEQ ID NO: 144489 - protein, 9 aa, Homo sapiens
PCNFCNRFL

SEQ ID NO: 144490 - protein, 9 aa, Homo sapiens
CNFCNRFLS

SEQ ID NO: 144491 - protein, 9 aa, Homo sapiens
NFCNRFLSY

SEQ ID NO: 144492 - protein, 9 aa, Homo sapiens
FCNRFLSYF

SEQ ID NO: 144493 - protein, 9 aa, Homo sapiens
CNRFLSYFE

SEQ ID NO: 144494 - protein, 9 aa, Homo sapiens
NRFLSYFEL

SEQ ID NO: 144495 - protein, 9 aa, Homo sapiens
RFLSYFELL

SEQ ID NO: 144496 - protein, 9 aa, Homo sapiens
FLSYFELLS

SEQ ID NO: 144497 - protein, 9 aa, Homo sapiens
LSYFELLSF

SEQ ID NO: 144498 - protein, 9 aa, Homo sapiens
SYFELLSFD

SEQ ID NO: 144499 - protein, 9 aa, Homo sapiens
YFELLSFDY

SEQ ID NO: 144500 - protein, 9 aa, Homo sapiens
FELLSFDYK

SEQ ID NO: 144501 - protein, 9 aa, Homo sapiens
ELLSFDYKY

SEQ ID NO: 144502 - protein, 9 aa, Homo sapiens
LLSFDYKYL

SEQ ID NO: 144503 - protein, 9 aa, Homo sapiens
LSFDYKYLQ

SEQ ID NO: 144504 - protein, 9 aa, Homo sapiens
SFDYKYLQL

SEQ ID NO: 144505 - protein, 9 aa, Homo sapiens
FDYKYLQLI

SEQ ID NO: 144506 - protein, 9 aa, Homo sapiens
DYKYLQLIW

SEQ ID NO: 144507 - protein, 9 aa, Homo sapiens
YKYLQLIWT

SEQ ID NO: 144508 - protein, 9 aa, Homo sapiens
KYLQLIWTV

SEQ ID NO: 144509 - protein, 9 aa, Homo sapiens
YLQLIWTVE

SEQ ID NO: 144510 - protein, 9 aa, Homo sapiens
LQLIWTVED

SEQ ID NO: 144511 - protein, 9 aa, Homo sapiens
QLIWTVEDL

SEQ ID NO: 144512 - protein, 9 aa, Homo sapiens
LIWTVEDLV

SEQ ID NO: 144513 - protein, 9 aa, Homo sapiens
IWTVEDLVY

SEQ ID NO: 144514 - protein, 9 aa, Homo sapiens
WTVEDLVYA

SEQ ID NO: 144515 - protein, 9 aa, Homo sapiens
TVEDLVYAI

SEQ ID NO: 144516 - protein, 9 aa, Homo sapiens
VEDLVYAIC

SEQ ID NO: 144517 - protein, 9 aa, Homo sapiens
EDLVYAICS

SEQ ID NO: 144518 - protein, 9 aa, Homo sapiens
DLVYAICSS

SEQ ID NO: 144519 - protein, 9 aa, Homo sapiens
LVYAICSSC

SEQ ID NO: 144520 - protein, 9 aa, Homo sapiens
VYAICSSCA

SEQ ID NO: 144521 - protein, 9 aa, Homo sapiens
YAICSSCAF

SEQ ID NO: 144522 - protein, 9 aa, Homo sapiens
AICSSCAFA

SEQ ID NO: 144523 - protein, 9 aa, Homo sapiens
ICSSCAFAS

SEQ ID NO: 144524 - protein, 9 aa, Homo sapiens
CSSCAFASA

SEQ ID NO: 144525 - protein, 9 aa, Homo sapiens
SSCAFASAQ

SEQ ID NO: 144526 - protein, 9 aa, Homo sapiens
SCAFASAQF

SEQ ID NO: 144527 - protein, 9 aa, Homo sapiens
CAFASAQFE

SEQ ID NO: 144528 - protein, 9 aa, Homo sapiens
AFASAQFEF

SEQ ID NO: 144529 - protein, 9 aa, Homo sapiens
FASAQFEFM

SEQ ID NO: 144530 - protein, 9 aa, Homo sapiens
ASAQFEFMK

SEQ ID NO: 144531 - protein, 9 aa, Homo sapiens
SAQFEFMKY

SEQ ID NO: 144532 - protein, 9 aa, Homo sapiens
AQFEFMKYF

SEQ ID NO: 144533 - protein, 9 aa, Homo sapiens
QFEFMKYFE

SEQ ID NO: 144534 - protein, 9 aa, Homo sapiens
FEFMKYFEY

SEQ ID NO: 144535 - protein, 9 aa, Homo sapiens
EFMKYFEYS

SEQ ID NO: 144536 - protein, 9 aa, Homo sapiens
FMKYFEYSV

SEQ ID NO: 144537 - protein, 9 aa, Homo sapiens
MKYFEYSVV

SEQ ID NO: 144538 - protein, 9 aa, Homo sapiens
KYFEYSVVG

SEQ ID NO: 144539 - protein, 9 aa, Homo sapiens
YFEYSVVGK

SEQ ID NO: 144540 - protein, 9 aa, Homo sapiens
FEYSVVGKQ

SEQ ID NO: 144541 - protein, 9 aa, Homo sapiens
EYSVVGKQI

SEQ ID NO: 144542 - protein, 9 aa, Homo sapiens
YSVVGKQIE

SEQ ID NO: 144543 - protein, 9 aa, Homo sapiens
SVVGKQIET

SEQ ID NO: 144544 - protein, 9 aa, Homo sapiens
VVGKQIETV

SEQ ID NO: 144545 - protein, 9 aa, Homo sapiens
VGKQIETVA

SEQ ID NO: 144546 - protein, 9 aa, Homo sapiens
GKQIETVAN

SEQ ID NO: 144547 - protein, 9 aa, Homo sapiens
KQIETVANQ

SEQ ID NO: 144548 - protein, 9 aa, Homo sapiens
QIETVANQP

SEQ ID NO: 144549 - protein, 9 aa, Homo sapiens
IETVANQPI

SEQ ID NO: 144550 - protein, 9 aa, Homo sapiens
ETVANQPIG

SEQ ID NO: 144551 - protein, 9 aa, Homo sapiens
TVANQPIGN

SEQ ID NO: 144552 - protein, 9 aa, Homo sapiens
VANQPIGNI

SEQ ID NO: 144553 - protein, 9 aa, Homo sapiens
ANQPIGNIT

SEQ ID NO: 144554 - protein, 9 aa, Homo sapiens
NQPIGNITV

SEQ ID NO: 144555 - protein, 9 aa, Homo sapiens
QPIGNITVR

SEQ ID NO: 144556 - protein, 9 aa, Homo sapiens
PIGNITVRC

SEQ ID NO: 144557 - protein, 9 aa, Homo sapiens
IGNITVRCQ

SEQ ID NO: 144558 - protein, 9 aa, Homo sapiens
GNITVRCQY

SEQ ID NO: 144559 - protein, 9 aa, Homo sapiens
NITVRCQYC

SEQ ID NO: 144560 - protein, 9 aa, Homo sapiens
ITVRCQYCL

SEQ ID NO: 144561 - protein, 9 aa, Homo sapiens
TVRCQYCLK

SEQ ID NO: 144562 - protein, 9 aa, Homo sapiens
VRCQYCLKK

SEQ ID NO: 144563 - protein, 9 aa, Homo sapiens
RCQYCLKKL

SEQ ID NO: 144564 - protein, 9 aa, Homo sapiens
CQYCLKKLD

SEQ ID NO: 144565 - protein, 9 aa, Homo sapiens
QYCLKKLDL

SEQ ID NO: 144566 - protein, 9 aa, Homo sapiens
YCLKKLDLV

SEQ ID NO: 144567 - protein, 9 aa, Homo sapiens
CLKKLDLVE

SEQ ID NO: 144568 - protein, 9 aa, Homo sapiens
LKKLDLVEK

SEQ ID NO: 144569 - protein, 9 aa, Homo sapiens
KKLDLVEKL

SEQ ID NO: 144570 - protein, 9 aa, Homo sapiens
KLDLVEKLG

SEQ ID NO: 144571 - protein, 9 aa, Homo sapiens
LDLVEKLGV

SEQ ID NO: 144572 - protein, 9 aa, Homo sapiens
DLVEKLGVC

SEQ ID NO: 144573 - protein, 9 aa, Homo sapiens
LVEKLGVCY

SEQ ID NO: 144574 - protein, 9 aa, Homo sapiens
VEKLGVCYK

SEQ ID NO: 144575 - protein, 9 aa, Homo sapiens
EKLGVCYKQ

SEQ ID NO: 144576 - protein, 9 aa, Homo sapiens
KLGVCYKQQ

SEQ ID NO: 144577 - protein, 9 aa, Homo sapiens
LGVCYKQQY

SEQ ID NO: 144578 - protein, 9 aa, Homo sapiens
GVCYKQQYF

SEQ ID NO: 144579 - protein, 9 aa, Homo sapiens
VCYKQQYFH

SEQ ID NO: 144580 - protein, 9 aa, Homo sapiens
CYKQQYFHR

SEQ ID NO: 144581 - protein, 9 aa, Homo sapiens
YKQQYFHRV

SEQ ID NO: 144582 - protein, 9 aa, Homo sapiens
KQQYFHRVR

SEQ ID NO: 144583 - protein, 9 aa, Homo sapiens
QQYFHRVRD

SEQ ID NO: 144584 - protein, 9 aa, Homo sapiens
QYFHRVRDN

SEQ ID NO: 144585 - protein, 9 aa, Homo sapiens
YFHRVRDNW

SEQ ID NO: 144586 - protein, 9 aa, Homo sapiens
FHRVRDNWK

SEQ ID NO: 144587 - protein, 9 aa, Homo sapiens
HRVRDNWKG

SEQ ID NO: 144588 - protein, 9 aa, Homo sapiens
RVRDNWKGL

SEQ ID NO: 144589 - protein, 9 aa, Homo sapiens
VRDNWKGLC

SEQ ID NO: 144590 - protein, 9 aa, Homo sapiens
RDNWKGLCR

SEQ ID NO: 144591 - protein, 9 aa, Homo sapiens
DNWKGLCRH

SEQ ID NO: 144592 - protein, 9 aa, Homo sapiens
NWKGLCRHC

SEQ ID NO: 144593 - protein, 9 aa, Homo sapiens
WKGLCRHCG

SEQ ID NO: 144594 - protein, 9 aa, Homo sapiens
KGLCRHCGS

SEQ ID NO: 144595 - protein, 9 aa, Homo sapiens
GLCRHCGSI

SEQ ID NO: 144596 - protein, 9 aa, Homo sapiens
LCRHCGSIE

SEQ ID NO: 144597 - protein, 8 aa, Homo sapiens
CRHCGSIE

SEQ ID NO: 144598 - protein, 7 aa, Homo sapiens
RHCGSIE

SEQ ID NO: 144599 - protein, 9 aa, Homo sapiens
MIGKEVTVQ

SEQ ID NO: 144600 - protein, 9 aa, Homo sapiens
IGKEVTVQD

SEQ ID NO: 144601 - protein, 9 aa, Homo sapiens
GKEVTVQDI

SEQ ID NO: 144602 - protein, 9 aa, Homo sapiens
KEVTVQDII

SEQ ID NO: 144603 - protein, 9 aa, Homo sapiens
EVTVQDIIL

SEQ ID NO: 144604 - protein, 9 aa, Homo sapiens
VTVQDIILE

SEQ ID NO: 144605 - protein, 9 aa, Homo sapiens
TVQDIILEL

SEQ ID NO: 144606 - protein, 9 aa, Homo sapiens
VQDIILELS

SEQ ID NO: 144607 - protein, 9 aa, Homo sapiens
QDIILELSE

SEQ ID NO: 144608 - protein, 9 aa, Homo sapiens
DIILELSEV

SEQ ID NO: 144609 - protein, 9 aa, Homo sapiens
IILELSEVQ

SEQ ID NO: 144610 - protein, 9 aa, Homo sapiens
ILELSEVQP

SEQ ID NO: 144611 - protein, 9 aa, Homo sapiens
LELSEVQPE

SEQ ID NO: 144612 - protein, 9 aa, Homo sapiens
ELSEVQPEV

SEQ ID NO: 144613 - protein, 9 aa, Homo sapiens
LSEVQPEVL

SEQ ID NO: 144614 - protein, 9 aa, Homo sapiens
SEVQPEVLP

SEQ ID NO: 144615 - protein, 9 aa, Homo sapiens
EVQPEVLPV

SEQ ID NO: 144616 - protein, 9 aa, Homo sapiens
VQPEVLPVD

SEQ ID NO: 144617 - protein, 9 aa, Homo sapiens
QPEVLPVDL

SEQ ID NO: 144618 - protein, 9 aa, Homo sapiens
PEVLPVDLF

SEQ ID NO: 144619 - protein, 9 aa, Homo sapiens
EVLPVDLFC

SEQ ID NO: 144620 - protein, 9 aa, Homo sapiens
VLPVDLFCE

SEQ ID NO: 144621 - protein, 9 aa, Homo sapiens
LPVDLFCEE

SEQ ID NO: 144622 - protein, 9 aa, Homo sapiens
PVDLFCEEE

SEQ ID NO: 144623 - protein, 9 aa, Homo sapiens
VDLFCEEEL

SEQ ID NO: 144624 - protein, 9 aa, Homo sapiens
DLFCEEELP

SEQ ID NO: 144625 - protein, 9 aa, Homo sapiens
LFCEEELPN

SEQ ID NO: 144626 - protein, 9 aa, Homo sapiens
FCEEELPNE

SEQ ID NO: 144627 - protein, 9 aa, Homo sapiens
CEEELPNEQ

SEQ ID NO: 144628 - protein, 9 aa, Homo sapiens
EEELPNEQE

SEQ ID NO: 144629 - protein, 9 aa, Homo sapiens
EELPNEQET

SEQ ID NO: 144630 - protein, 9 aa, Homo sapiens
ELPNEQETE

SEQ ID NO: 144631 - protein, 9 aa, Homo sapiens
LPNEQETEE

SEQ ID NO: 144632 - protein, 9 aa, Homo sapiens
PNEQETEEE

SEQ ID NO: 144633 - protein, 9 aa, Homo sapiens
NEQETEEEP

SEQ ID NO: 144634 - protein, 9 aa, Homo sapiens
EQETEEEPD

SEQ ID NO: 144635 - protein, 9 aa, Homo sapiens
QETEEEPDI

SEQ ID NO: 144636 - protein, 9 aa, Homo sapiens
ETEEEPDIE

SEQ ID NO: 144637 - protein, 9 aa, Homo sapiens
TEEEPDIER

SEQ ID NO: 144638 - protein, 9 aa, Homo sapiens
EEEPDIERI

SEQ ID NO: 144639 - protein, 9 aa, Homo sapiens
EEPDIERIS

SEQ ID NO: 144640 - protein, 9 aa, Homo sapiens
EPDIERISY

SEQ ID NO: 144641 - protein, 9 aa, Homo sapiens
PDIERISYK

SEQ ID NO: 144642 - protein, 9 aa, Homo sapiens
DIERISYKV

SEQ ID NO: 144643 - protein, 9 aa, Homo sapiens
IERISYKVI

SEQ ID NO: 144644 - protein, 9 aa, Homo sapiens
ERISYKVIA

SEQ ID NO: 144645 - protein, 9 aa, Homo sapiens
RISYKVIAP

SEQ ID NO: 144646 - protein, 9 aa, Homo sapiens
ISYKVIAPC

SEQ ID NO: 144647 - protein, 9 aa, Homo sapiens
SYKVIAPCG

SEQ ID NO: 144648 - protein, 9 aa, Homo sapiens
YKVIAPCGC

SEQ ID NO: 144649 - protein, 9 aa, Homo sapiens
KVIAPCGCR

SEQ ID NO: 144650 - protein, 9 aa, Homo sapiens
VIAPCGCRH

SEQ ID NO: 144651 - protein, 9 aa, Homo sapiens
IAPCGCRHC

SEQ ID NO: 144652 - protein, 9 aa, Homo sapiens
APCGCRHCE

SEQ ID NO: 144653 - protein, 9 aa, Homo sapiens
PCGCRHCEV

SEQ ID NO: 144654 - protein, 9 aa, Homo sapiens
CGCRHCEVK

SEQ ID NO: 144655 - protein, 9 aa, Homo sapiens
GCRHCEVKL

SEQ ID NO: 144656 - protein, 9 aa, Homo sapiens
CRHCEVKLR

SEQ ID NO: 144657 - protein, 9 aa, Homo sapiens
RHCEVKLRI

SEQ ID NO: 144658 - protein, 9 aa, Homo sapiens
HCEVKLRIF

SEQ ID NO: 144659 - protein, 9 aa, Homo sapiens
CEVKLRIFV

SEQ ID NO: 144660 - protein, 9 aa, Homo sapiens
EVKLRIFVH

SEQ ID NO: 144661 - protein, 9 aa, Homo sapiens
VKLRIFVHA

SEQ ID NO: 144662 - protein, 9 aa, Homo sapiens
KLRIFVHAT

SEQ ID NO: 144663 - protein, 9 aa, Homo sapiens
LRIFVHATE

SEQ ID NO: 144664 - protein, 9 aa, Homo sapiens
RIFVHATEF

SEQ ID NO: 144665 - protein, 9 aa, Homo sapiens
IFVHATEFG

SEQ ID NO: 144666 - protein, 9 aa, Homo sapiens
FVHATEFGI

SEQ ID NO: 144667 - protein, 9 aa, Homo sapiens
VHATEFGIR

SEQ ID NO: 144668 - protein, 9 aa, Homo sapiens
HATEFGIRA

SEQ ID NO: 144669 - protein, 9 aa, Homo sapiens
ATEFGIRAF

SEQ ID NO: 144670 - protein, 9 aa, Homo sapiens
TEFGIRAFQ

SEQ ID NO: 144671 - protein, 9 aa, Homo sapiens
EFGIRAFQQ

SEQ ID NO: 144672 - protein, 9 aa, Homo sapiens
FGIRAFQQL

SEQ ID NO: 144673 - protein, 9 aa, Homo sapiens
GIRAFQQLL

SEQ ID NO: 144674 - protein, 9 aa, Homo sapiens
IRAFQQLLT

SEQ ID NO: 144675 - protein, 9 aa, Homo sapiens
RAFQQLLTG

SEQ ID NO: 144676 - protein, 9 aa, Homo sapiens
AFQQLLTGD

SEQ ID NO: 144677 - protein, 9 aa, Homo sapiens
FQQLLTGDL

SEQ ID NO: 144678 - protein, 9 aa, Homo sapiens
QQLLTGDLQ

SEQ ID NO: 144679 - protein, 9 aa, Homo sapiens
QLLTGDLQL

SEQ ID NO: 144680 - protein, 9 aa, Homo sapiens
LLTGDLQLL

SEQ ID NO: 144681 - protein, 9 aa, Homo sapiens
LTGDLQLLC

SEQ ID NO: 144682 - protein, 9 aa, Homo sapiens
TGDLQLLCP

SEQ ID NO: 144683 - protein, 9 aa, Homo sapiens
GDLQLLCPD

SEQ ID NO: 144684 - protein, 9 aa, Homo sapiens
DLQLLCPDC

SEQ ID NO: 144685 - protein, 9 aa, Homo sapiens
LQLLCPDCR

SEQ ID NO: 144686 - protein, 9 aa, Homo sapiens
QLLCPDCRG

SEQ ID NO: 144687 - protein, 9 aa, Homo sapiens
LLCPDCRGN

SEQ ID NO: 144688 - protein, 9 aa, Homo sapiens
LCPDCRGNC

SEQ ID NO: 144689 - protein, 9 aa, Homo sapiens
CPDCRGNCK

SEQ ID NO: 144690 - protein, 9 aa, Homo sapiens
PDCRGNCKH

SEQ ID NO: 144691 - protein, 9 aa, Homo sapiens
DCRGNCKHD

SEQ ID NO: 144692 - protein, 9 aa, Homo sapiens
CRGNCKHDG

SEQ ID NO: 144693 - protein, 9 aa, Homo sapiens
RGNCKHDGS

SEQ ID NO: 144694 - protein, 9 aa, Homo sapiens
MHGRHVTLK

SEQ ID NO: 144695 - protein, 9 aa, Homo sapiens
HGRHVTLKD

SEQ ID NO: 144696 - protein, 9 aa, Homo sapiens
GRHVTLKDI

SEQ ID NO: 144697 - protein, 9 aa, Homo sapiens
RHVTLKDIV

SEQ ID NO: 144698 - protein, 9 aa, Homo sapiens
HVTLKDIVL

SEQ ID NO: 144699 - protein, 9 aa, Homo sapiens
VTLKDIVLD

SEQ ID NO: 144700 - protein, 9 aa, Homo sapiens
TLKDIVLDL

SEQ ID NO: 144701 - protein, 9 aa, Homo sapiens
LKDIVLDLQ

SEQ ID NO: 144702 - protein, 9 aa, Homo sapiens
KDIVLDLQP

SEQ ID NO: 144703 - protein, 9 aa, Homo sapiens
DIVLDLQPP

SEQ ID NO: 144704 - protein, 9 aa, Homo sapiens
IVLDLQPPD

SEQ ID NO: 144705 - protein, 9 aa, Homo sapiens
VLDLQPPDP

SEQ ID NO: 144706 - protein, 9 aa, Homo sapiens
LDLQPPDPV

SEQ ID NO: 144707 - protein, 9 aa, Homo sapiens
DLQPPDPVG

SEQ ID NO: 144708 - protein, 9 aa, Homo sapiens
LQPPDPVGL

SEQ ID NO: 144709 - protein, 9 aa, Homo sapiens
QPPDPVGLH

SEQ ID NO: 144710 - protein, 9 aa, Homo sapiens
PPDPVGLHC

SEQ ID NO: 144711 - protein, 9 aa, Homo sapiens
PDPVGLHCY

SEQ ID NO: 144712 - protein, 9 aa, Homo sapiens
DPVGLHCYE

SEQ ID NO: 144713 - protein, 9 aa, Homo sapiens
PVGLHCYEQ

SEQ ID NO: 144714 - protein, 9 aa, Homo sapiens
VGLHCYEQL

SEQ ID NO: 144715 - protein, 9 aa, Homo sapiens
GLHCYEQLV

SEQ ID NO: 144716 - protein, 9 aa, Homo sapiens
LHCYEQLVD

SEQ ID NO: 144717 - protein, 9 aa, Homo sapiens
HCYEQLVDS

SEQ ID NO: 144718 - protein, 9 aa, Homo sapiens
CYEQLVDSS

SEQ ID NO: 144719 - protein, 9 aa, Homo sapiens
YEQLVDSSE

SEQ ID NO: 144720 - protein, 9 aa, Homo sapiens
EQLVDSSED

SEQ ID NO: 144721 - protein, 9 aa, Homo sapiens
QLVDSSEDE

SEQ ID NO: 144722 - protein, 9 aa, Homo sapiens
LVDSSEDEV

SEQ ID NO: 144723 - protein, 9 aa, Homo sapiens
VDSSEDEVD

SEQ ID NO: 144724 - protein, 9 aa, Homo sapiens
DSSEDEVDE

SEQ ID NO: 144725 - protein, 9 aa, Homo sapiens
SSEDEVDEV

SEQ ID NO: 144726 - protein, 9 aa, Homo sapiens
SEDEVDEVD

SEQ ID NO: 144727 - protein, 9 aa, Homo sapiens
EDEVDEVDG

SEQ ID NO: 144728 - protein, 9 aa, Homo sapiens
DEVDEVDGQ

SEQ ID NO: 144729 - protein, 9 aa, Homo sapiens
EVDEVDGQD

SEQ ID NO: 144730 - protein, 9 aa, Homo sapiens
VDEVDGQDS

SEQ ID NO: 144731 - protein, 9 aa, Homo sapiens
DEVDGQDSQ

SEQ ID NO: 144732 - protein, 9 aa, Homo sapiens
EVDGQDSQP

SEQ ID NO: 144733 - protein, 9 aa, Homo sapiens
VDGQDSQPL

SEQ ID NO: 144734 - protein, 9 aa, Homo sapiens
DGQDSQPLK

SEQ ID NO: 144735 - protein, 9 aa, Homo sapiens
GQDSQPLKQ

SEQ ID NO: 144736 - protein, 9 aa, Homo sapiens
QDSQPLKQH

SEQ ID NO: 144737 - protein, 9 aa, Homo sapiens
DSQPLKQHY

SEQ ID NO: 144738 - protein, 9 aa, Homo sapiens
SQPLKQHYQ

SEQ ID NO: 144739 - protein, 9 aa, Homo sapiens
QPLKQHYQI

SEQ ID NO: 144740 - protein, 9 aa, Homo sapiens
PLKQHYQIV

SEQ ID NO: 144741 - protein, 9 aa, Homo sapiens
LKQHYQIVT

SEQ ID NO: 144742 - protein, 9 aa, Homo sapiens
KQHYQIVTC

SEQ ID NO: 144743 - protein, 9 aa, Homo sapiens
QHYQIVTCC

SEQ ID NO: 144744 - protein, 9 aa, Homo sapiens
HYQIVTCCC

SEQ ID NO: 144745 - protein, 9 aa, Homo sapiens
YQIVTCCCG

SEQ ID NO: 144746 - protein, 9 aa, Homo sapiens
QIVTCCCGC

SEQ ID NO: 144747 - protein, 9 aa, Homo sapiens
IVTCCCGCD

SEQ ID NO: 144748 - protein, 9 aa, Homo sapiens
VTCCCGCDS

SEQ ID NO: 144749 - protein, 9 aa, Homo sapiens
TCCCGCDSN

SEQ ID NO: 144750 - protein, 9 aa, Homo sapiens
CCCGCDSNV

SEQ ID NO: 144751 - protein, 9 aa, Homo sapiens
CCGCDSNVR

SEQ ID NO: 144752 - protein, 9 aa, Homo sapiens
CGCDSNVRL

SEQ ID NO: 144753 - protein, 9 aa, Homo sapiens
GCDSNVRLV

SEQ ID NO: 144754 - protein, 9 aa, Homo sapiens
CDSNVRLVV

SEQ ID NO: 144755 - protein, 9 aa, Homo sapiens
DSNVRLVVQ

SEQ ID NO: 144756 - protein, 9 aa, Homo sapiens
SNVRLVVQC

SEQ ID NO: 144757 - protein, 9 aa, Homo sapiens
NVRLVVQCT

SEQ ID NO: 144758 - protein, 9 aa, Homo sapiens
VRLVVQCTE

SEQ ID NO: 144759 - protein, 9 aa, Homo sapiens
RLVVQCTET

SEQ ID NO: 144760 - protein, 9 aa, Homo sapiens
LVVQCTETD

SEQ ID NO: 144761 - protein, 9 aa, Homo sapiens
VVQCTETDI

SEQ ID NO: 144762 - protein, 9 aa, Homo sapiens
VQCTETDIR

SEQ ID NO: 144763 - protein, 9 aa, Homo sapiens
QCTETDIRE

SEQ ID NO: 144764 - protein, 9 aa, Homo sapiens
CTETDIREV

SEQ ID NO: 144765 - protein, 9 aa, Homo sapiens
TETDIREVQ

SEQ ID NO: 144766 - protein, 9 aa, Homo sapiens
ETDIREVQQ

SEQ ID NO: 144767 - protein, 9 aa, Homo sapiens
TDIREVQQL

SEQ ID NO: 144768 - protein, 9 aa, Homo sapiens
DIREVQQLL

SEQ ID NO: 144769 - protein, 9 aa, Homo sapiens
IREVQQLLL

SEQ ID NO: 144770 - protein, 9 aa, Homo sapiens
REVQQLLLG

SEQ ID NO: 144771 - protein, 9 aa, Homo sapiens
EVQQLLLGT

SEQ ID NO: 144772 - protein, 9 aa, Homo sapiens
VQQLLLGTL

SEQ ID NO: 144773 - protein, 9 aa, Homo sapiens
QQLLLGTLN

SEQ ID NO: 144774 - protein, 9 aa, Homo sapiens
QLLLGTLNI

SEQ ID NO: 144775 - protein, 9 aa, Homo sapiens
LLLGTLNIV

SEQ ID NO: 144776 - protein, 9 aa, Homo sapiens
LLGTLNIVC

SEQ ID NO: 144777 - protein, 9 aa, Homo sapiens
LGTLNIVCP

SEQ ID NO: 144778 - protein, 9 aa, Homo sapiens
GTLNIVCPI

SEQ ID NO: 144779 - protein, 9 aa, Homo sapiens
TLNIVCPIC

SEQ ID NO: 144780 - protein, 9 aa, Homo sapiens
LNIVCPICA

SEQ ID NO: 144781 - protein, 9 aa, Homo sapiens
NIVCPICAP

SEQ ID NO: 144782 - protein, 9 aa, Homo sapiens
IVCPICAPK

SEQ ID NO: 144783 - protein, 9 aa, Homo sapiens
VCPICAPKT

SEQ ID NO: 144784 - protein, 9 aa, Homo sapiens
MIGKEVTVQ

SEQ ID NO: 144785 - protein, 9 aa, Homo sapiens
IGKEVTVQD

SEQ ID NO: 144786 - protein, 9 aa, Homo sapiens
GKEVTVQDF

SEQ ID NO: 144787 - protein, 9 aa, Homo sapiens
KEVTVQDFT

SEQ ID NO: 144788 - protein, 9 aa, Homo sapiens
EVTVQDFTL

SEQ ID NO: 144789 - protein, 9 aa, Homo sapiens
VTVQDFTLE

SEQ ID NO: 144790 - protein, 9 aa, Homo sapiens
TVQDFTLEL

SEQ ID NO: 144791 - protein, 9 aa, Homo sapiens
VQDFTLELS

SEQ ID NO: 144792 - protein, 9 aa, Homo sapiens
QDFTLELSE

SEQ ID NO: 144793 - protein, 9 aa, Homo sapiens
DFTLELSEL

SEQ ID NO: 144794 - protein, 9 aa, Homo sapiens
FTLELSELQ

SEQ ID NO: 144795 - protein, 9 aa, Homo sapiens
TLELSELQP

SEQ ID NO: 144796 - protein, 9 aa, Homo sapiens
LELSELQPE

SEQ ID NO: 144797 - protein, 9 aa, Homo sapiens
ELSELQPEV

SEQ ID NO: 144798 - protein, 9 aa, Homo sapiens
LSELQPEVL

SEQ ID NO: 144799 - protein, 9 aa, Homo sapiens
SELQPEVLP

SEQ ID NO: 144800 - protein, 9 aa, Homo sapiens
ELQPEVLPV

SEQ ID NO: 144801 - protein, 9 aa, Homo sapiens
LQPEVLPVD

SEQ ID NO: 144802 - protein, 9 aa, Homo sapiens
QPEVLPVDL

SEQ ID NO: 144803 - protein, 9 aa, Homo sapiens
PEVLPVDLL

SEQ ID NO: 144804 - protein, 9 aa, Homo sapiens
EVLPVDLLC

SEQ ID NO: 144805 - protein, 9 aa, Homo sapiens
VLPVDLLCE

SEQ ID NO: 144806 - protein, 9 aa, Homo sapiens
LPVDLLCEE

SEQ ID NO: 144807 - protein, 9 aa, Homo sapiens
PVDLLCEEE

SEQ ID NO: 144808 - protein, 9 aa, Homo sapiens
VDLLCEEEL

SEQ ID NO: 144809 - protein, 9 aa, Homo sapiens
DLLCEEELP

SEQ ID NO: 144810 - protein, 9 aa, Homo sapiens
LLCEEELPN

SEQ ID NO: 144811 - protein, 9 aa, Homo sapiens
LCEEELPNE

SEQ ID NO: 144812 - protein, 9 aa, Homo sapiens
CEEELPNEQ

SEQ ID NO: 144813 - protein, 9 aa, Homo sapiens
EEELPNEQE

SEQ ID NO: 144814 - protein, 9 aa, Homo sapiens
EELPNEQET

SEQ ID NO: 144815 - protein, 9 aa, Homo sapiens
ELPNEQETE

SEQ ID NO: 144816 - protein, 9 aa, Homo sapiens
LPNEQETEE

SEQ ID NO: 144817 - protein, 9 aa, Homo sapiens
PNEQETEEE

SEQ ID NO: 144818 - protein, 9 aa, Homo sapiens
NEQETEEES

SEQ ID NO: 144819 - protein, 9 aa, Homo sapiens
EQETEEESD

SEQ ID NO: 144820 - protein, 9 aa, Homo sapiens
QETEEESDI

SEQ ID NO: 144821 - protein, 9 aa, Homo sapiens
ETEEESDID

SEQ ID NO: 144822 - protein, 9 aa, Homo sapiens
TEEESDIDR

SEQ ID NO: 144823 - protein, 9 aa, Homo sapiens
EEESDIDRT

SEQ ID NO: 144824 - protein, 9 aa, Homo sapiens
EESDIDRTV

SEQ ID NO: 144825 - protein, 9 aa, Homo sapiens
ESDIDRTVF

SEQ ID NO: 144826 - protein, 9 aa, Homo sapiens
SDIDRTVFK

SEQ ID NO: 144827 - protein, 9 aa, Homo sapiens
DIDRTVFKI

SEQ ID NO: 144828 - protein, 9 aa, Homo sapiens
IDRTVFKII

SEQ ID NO: 144829 - protein, 9 aa, Homo sapiens
DRTVFKIIA

SEQ ID NO: 144830 - protein, 9 aa, Homo sapiens
RTVFKIIAP

SEQ ID NO: 144831 - protein, 9 aa, Homo sapiens
TVFKIIAPC

SEQ ID NO: 144832 - protein, 9 aa, Homo sapiens
VFKIIAPCG

SEQ ID NO: 144833 - protein, 9 aa, Homo sapiens
FKIIAPCGC

SEQ ID NO: 144834 - protein, 9 aa, Homo sapiens
KIIAPCGCS

SEQ ID NO: 144835 - protein, 9 aa, Homo sapiens
IIAPCGCSS

SEQ ID NO: 144836 - protein, 9 aa, Homo sapiens
IAPCGCSSC

SEQ ID NO: 144837 - protein, 9 aa, Homo sapiens
APCGCSSCE

SEQ ID NO: 144838 - protein, 9 aa, Homo sapiens
PCGCSSCEV

SEQ ID NO: 144839 - protein, 9 aa, Homo sapiens
CGCSSCEVN

SEQ ID NO: 144840 - protein, 9 aa, Homo sapiens
GCSSCEVNL

SEQ ID NO: 144841 - protein, 9 aa, Homo sapiens
CSSCEVNLR

SEQ ID NO: 144842 - protein, 9 aa, Homo sapiens
SSCEVNLRI

SEQ ID NO: 144843 - protein, 9 aa, Homo sapiens
SCEVNLRIF

SEQ ID NO: 144844 - protein, 9 aa, Homo sapiens
CEVNLRIFV

SEQ ID NO: 144845 - protein, 9 aa, Homo sapiens
EVNLRIFVN

SEQ ID NO: 144846 - protein, 9 aa, Homo sapiens
VNLRIFVNA

SEQ ID NO: 144847 - protein, 9 aa, Homo sapiens
NLRIFVNAT

SEQ ID NO: 144848 - protein, 9 aa, Homo sapiens
LRIFVNATD

SEQ ID NO: 144849 - protein, 9 aa, Homo sapiens
RIFVNATDT

SEQ ID NO: 144850 - protein, 9 aa, Homo sapiens
IFVNATDTG

SEQ ID NO: 144851 - protein, 9 aa, Homo sapiens
FVNATDTGI

SEQ ID NO: 144852 - protein, 9 aa, Homo sapiens
VNATDTGIR

SEQ ID NO: 144853 - protein, 9 aa, Homo sapiens
NATDTGIRT

SEQ ID NO: 144854 - protein, 9 aa, Homo sapiens
ATDTGIRTL

SEQ ID NO: 144855 - protein, 9 aa, Homo sapiens
TDTGIRTLQ

SEQ ID NO: 144856 - protein, 9 aa, Homo sapiens
DTGIRTLQD

SEQ ID NO: 144857 - protein, 9 aa, Homo sapiens
TGIRTLQDL

SEQ ID NO: 144858 - protein, 9 aa, Homo sapiens
GIRTLQDLL

SEQ ID NO: 144859 - protein, 9 aa, Homo sapiens
IRTLQDLLI

SEQ ID NO: 144860 - protein, 9 aa, Homo sapiens
RTLQDLLIS

SEQ ID NO: 144861 - protein, 9 aa, Homo sapiens
TLQDLLISD

SEQ ID NO: 144862 - protein, 9 aa, Homo sapiens
LQDLLISDL

SEQ ID NO: 144863 - protein, 9 aa, Homo sapiens
QDLLISDLQ

SEQ ID NO: 144864 - protein, 9 aa, Homo sapiens
DLLISDLQL

SEQ ID NO: 144865 - protein, 9 aa, Homo sapiens
LLISDLQLL

SEQ ID NO: 144866 - protein, 9 aa, Homo sapiens
LISDLQLLC

SEQ ID NO: 144867 - protein, 9 aa, Homo sapiens
ISDLQLLCP

SEQ ID NO: 144868 - protein, 9 aa, Homo sapiens
SDLQLLCPE

SEQ ID NO: 144869 - protein, 9 aa, Homo sapiens
DLQLLCPEC

SEQ ID NO: 144870 - protein, 9 aa, Homo sapiens
LQLLCPECR

SEQ ID NO: 144871 - protein, 9 aa, Homo sapiens
QLLCPECRG

SEQ ID NO: 144872 - protein, 9 aa, Homo sapiens
LLCPECRGN

SEQ ID NO: 144873 - protein, 9 aa, Homo sapiens
LCPECRGNC

SEQ ID NO: 144874 - protein, 9 aa, Homo sapiens
CPECRGNCK

SEQ ID NO: 144875 - protein, 9 aa, Homo sapiens
PECRGNCKH

SEQ ID NO: 144876 - protein, 9 aa, Homo sapiens
ECRGNCKHG

SEQ ID NO: 144877 - protein, 9 aa, Homo sapiens
CRGNCKHGG

SEQ ID NO: 144878 - protein, 9 aa, Homo sapiens
RGNCKHGGF

SEQ ID NO: 144879 - protein, 9 aa, Homo sapiens
MHGKYPTLK

SEQ ID NO: 144880 - protein, 9 aa, Homo sapiens
HGKYPTLKD

SEQ ID NO: 144881 - protein, 9 aa, Homo sapiens
GKYPTLKDI

SEQ ID NO: 144882 - protein, 9 aa, Homo sapiens
KYPTLKDIV

SEQ ID NO: 144883 - protein, 9 aa, Homo sapiens
YPTLKDIVL

SEQ ID NO: 144884 - protein, 9 aa, Homo sapiens
PTLKDIVLE

SEQ ID NO: 144885 - protein, 9 aa, Homo sapiens
TLKDIVLEL

SEQ ID NO: 144886 - protein, 9 aa, Homo sapiens
LKDIVLELT

SEQ ID NO: 144887 - protein, 9 aa, Homo sapiens
KDIVLELTP

SEQ ID NO: 144888 - protein, 9 aa, Homo sapiens
DIVLELTPD

SEQ ID NO: 144889 - protein, 9 aa, Homo sapiens
IVLELTPDP

SEQ ID NO: 144890 - protein, 9 aa, Homo sapiens
VLELTPDPV

SEQ ID NO: 144891 - protein, 9 aa, Homo sapiens
LELTPDPVG

SEQ ID NO: 144892 - protein, 9 aa, Homo sapiens
ELTPDPVGL

SEQ ID NO: 144893 - protein, 9 aa, Homo sapiens
LTPDPVGLH

SEQ ID NO: 144894 - protein, 9 aa, Homo sapiens
TPDPVGLHC

SEQ ID NO: 144895 - protein, 9 aa, Homo sapiens
PDPVGLHCN

SEQ ID NO: 144896 - protein, 9 aa, Homo sapiens
DPVGLHCNE

SEQ ID NO: 144897 - protein, 9 aa, Homo sapiens
PVGLHCNEQ

SEQ ID NO: 144898 - protein, 9 aa, Homo sapiens
VGLHCNEQL

SEQ ID NO: 144899 - protein, 9 aa, Homo sapiens
GLHCNEQLD

SEQ ID NO: 144900 - protein, 9 aa, Homo sapiens
LHCNEQLDS

SEQ ID NO: 144901 - protein, 9 aa, Homo sapiens
HCNEQLDSS

SEQ ID NO: 144902 - protein, 9 aa, Homo sapiens
CNEQLDSSE

SEQ ID NO: 144903 - protein, 9 aa, Homo sapiens
NEQLDSSED

SEQ ID NO: 144904 - protein, 9 aa, Homo sapiens
EQLDSSEDE

SEQ ID NO: 144905 - protein, 9 aa, Homo sapiens
QLDSSEDEV

SEQ ID NO: 144906 - protein, 9 aa, Homo sapiens
LDSSEDEVD

SEQ ID NO: 144907 - protein, 9 aa, Homo sapiens
DSSEDEVDE

SEQ ID NO: 144908 - protein, 9 aa, Homo sapiens
SSEDEVDEQ

SEQ ID NO: 144909 - protein, 9 aa, Homo sapiens
SEDEVDEQA

SEQ ID NO: 144910 - protein, 9 aa, Homo sapiens
EDEVDEQAT

SEQ ID NO: 144911 - protein, 9 aa, Homo sapiens
DEVDEQATQ

SEQ ID NO: 144912 - protein, 9 aa, Homo sapiens
EVDEQATQA

SEQ ID NO: 144913 - protein, 9 aa, Homo sapiens
VDEQATQAT

SEQ ID NO: 144914 - protein, 9 aa, Homo sapiens
DEQATQATQ

SEQ ID NO: 144915 - protein, 9 aa, Homo sapiens
EQATQATQA

SEQ ID NO: 144916 - protein, 9 aa, Homo sapiens
QATQATQAT

SEQ ID NO: 144917 - protein, 9 aa, Homo sapiens
ATQATQATQ

SEQ ID NO: 144918 - protein, 9 aa, Homo sapiens
TQATQATQH

SEQ ID NO: 144919 - protein, 9 aa, Homo sapiens
QATQATQHS

SEQ ID NO: 144920 - protein, 9 aa, Homo sapiens
ATQATQHST

SEQ ID NO: 144921 - protein, 9 aa, Homo sapiens
TQATQHSTL

SEQ ID NO: 144922 - protein, 9 aa, Homo sapiens
QATQHSTLL

SEQ ID NO: 144923 - protein, 9 aa, Homo sapiens
ATQHSTLLQ

SEQ ID NO: 144924 - protein, 9 aa, Homo sapiens
TQHSTLLQC

SEQ ID NO: 144925 - protein, 9 aa, Homo sapiens
QHSTLLQCY

SEQ ID NO: 144926 - protein, 9 aa, Homo sapiens
HSTLLQCYQ

SEQ ID NO: 144927 - protein, 9 aa, Homo sapiens
STLLQCYQI

SEQ ID NO: 144928 - protein, 9 aa, Homo sapiens
TLLQCYQIL

SEQ ID NO: 144929 - protein, 9 aa, Homo sapiens
LLQCYQILT

SEQ ID NO: 144930 - protein, 9 aa, Homo sapiens
LQCYQILTS

SEQ ID NO: 144931 - protein, 9 aa, Homo sapiens
QCYQILTSC

SEQ ID NO: 144932 - protein, 9 aa, Homo sapiens
CYQILTSCS

SEQ ID NO: 144933 - protein, 9 aa, Homo sapiens
YQILTSCSK

SEQ ID NO: 144934 - protein, 9 aa, Homo sapiens
QILTSCSKC

SEQ ID NO: 144935 - protein, 9 aa, Homo sapiens
ILTSCSKCC

SEQ ID NO: 144936 - protein, 9 aa, Homo sapiens
LTSCSKCCS

SEQ ID NO: 144937 - protein, 9 aa, Homo sapiens
TSCSKCCSN

SEQ ID NO: 144938 - protein, 9 aa, Homo sapiens
SCSKCCSNV

SEQ ID NO: 144939 - protein, 9 aa, Homo sapiens
CSKCCSNVR

SEQ ID NO: 144940 - protein, 9 aa, Homo sapiens
SKCCSNVRL

SEQ ID NO: 144941 - protein, 9 aa, Homo sapiens
KCCSNVRLV

SEQ ID NO: 144942 - protein, 9 aa, Homo sapiens
CCSNVRLVV

SEQ ID NO: 144943 - protein, 9 aa, Homo sapiens
CSNVRLVVE

SEQ ID NO: 144944 - protein, 9 aa, Homo sapiens
SNVRLVVEC

SEQ ID NO: 144945 - protein, 9 aa, Homo sapiens
NVRLVVECT

SEQ ID NO: 144946 - protein, 9 aa, Homo sapiens
VRLVVECTG

SEQ ID NO: 144947 - protein, 9 aa, Homo sapiens
RLVVECTGP

SEQ ID NO: 144948 - protein, 9 aa, Homo sapiens
LVVECTGPD

SEQ ID NO: 144949 - protein, 9 aa, Homo sapiens
VVECTGPDI

SEQ ID NO: 144950 - protein, 9 aa, Homo sapiens
VECTGPDIH

SEQ ID NO: 144951 - protein, 9 aa, Homo sapiens
ECTGPDIHD

SEQ ID NO: 144952 - protein, 9 aa, Homo sapiens
CTGPDIHDL

SEQ ID NO: 144953 - protein, 9 aa, Homo sapiens
TGPDIHDLH

SEQ ID NO: 144954 - protein, 9 aa, Homo sapiens
GPDIHDLHD

SEQ ID NO: 144955 - protein, 9 aa, Homo sapiens
PDIHDLHDL

SEQ ID NO: 144956 - protein, 9 aa, Homo sapiens
DIHDLHDLL

SEQ ID NO: 144957 - protein, 9 aa, Homo sapiens
IHDLHDLLL

SEQ ID NO: 144958 - protein, 9 aa, Homo sapiens
HDLHDLLLG

SEQ ID NO: 144959 - protein, 9 aa, Homo sapiens
DLHDLLLGT

SEQ ID NO: 144960 - protein, 9 aa, Homo sapiens
LHDLLLGTL

SEQ ID NO: 144961 - protein, 9 aa, Homo sapiens
HDLLLGTLN

SEQ ID NO: 144962 - protein, 9 aa, Homo sapiens
DLLLGTLNI

SEQ ID NO: 144963 - protein, 9 aa, Homo sapiens
LLLGTLNIV

SEQ ID NO: 144964 - protein, 9 aa, Homo sapiens
LLGTLNIVC

SEQ ID NO: 144965 - protein, 9 aa, Homo sapiens
LGTLNIVCP

SEQ ID NO: 144966 - protein, 9 aa, Homo sapiens
GTLNIVCPL

SEQ ID NO: 144967 - protein, 9 aa, Homo sapiens
TLNIVCPLC

SEQ ID NO: 144968 - protein, 9 aa, Homo sapiens
LNIVCPLCA

SEQ ID NO: 144969 - protein, 9 aa, Homo sapiens
NIVCPLCAP

SEQ ID NO: 144970 - protein, 9 aa, Homo sapiens
IVCPLCAPK

SEQ ID NO: 144971 - protein, 9 aa, Homo sapiens
VCPLCAPKS

SEQ ID NO: 144972 - protein, 9 aa, Homo sapiens
MIGKEVTLQ

SEQ ID NO: 144973 - protein, 9 aa, Homo sapiens
IGKEVTLQD

SEQ ID NO: 144974 - protein, 9 aa, Homo sapiens
GKEVTLQDI

SEQ ID NO: 144975 - protein, 9 aa, Homo sapiens
KEVTLQDIV

SEQ ID NO: 144976 - protein, 9 aa, Homo sapiens
EVTLQDIVL

SEQ ID NO: 144977 - protein, 9 aa, Homo sapiens
VTLQDIVLE

SEQ ID NO: 144978 - protein, 9 aa, Homo sapiens
TLQDIVLEL

SEQ ID NO: 144979 - protein, 9 aa, Homo sapiens
LQDIVLELN

SEQ ID NO: 144980 - protein, 9 aa, Homo sapiens
QDIVLELNE

SEQ ID NO: 144981 - protein, 9 aa, Homo sapiens
DIVLELNEL

SEQ ID NO: 144982 - protein, 9 aa, Homo sapiens
IVLELNELQ

SEQ ID NO: 144983 - protein, 9 aa, Homo sapiens
VLELNELQP

SEQ ID NO: 144984 - protein, 9 aa, Homo sapiens
LELNELQPE

SEQ ID NO: 144985 - protein, 9 aa, Homo sapiens
ELNELQPEV

SEQ ID NO: 144986 - protein, 9 aa, Homo sapiens
LNELQPEVQ

SEQ ID NO: 144987 - protein, 9 aa, Homo sapiens
NELQPEVQP

SEQ ID NO: 144988 - protein, 9 aa, Homo sapiens
ELQPEVQPV

SEQ ID NO: 144989 - protein, 9 aa, Homo sapiens
LQPEVQPVD

SEQ ID NO: 144990 - protein, 9 aa, Homo sapiens
QPEVQPVDL

SEQ ID NO: 144991 - protein, 9 aa, Homo sapiens
PEVQPVDLF

SEQ ID NO: 144992 - protein, 9 aa, Homo sapiens
EVQPVDLFC

SEQ ID NO: 144993 - protein, 9 aa, Homo sapiens
VQPVDLFCE

SEQ ID NO: 144994 - protein, 9 aa, Homo sapiens
QPVDLFCEE

SEQ ID NO: 144995 - protein, 9 aa, Homo sapiens
PVDLFCEEE

SEQ ID NO: 144996 - protein, 9 aa, Homo sapiens
VDLFCEEEL

SEQ ID NO: 144997 - protein, 9 aa, Homo sapiens
DLFCEEELP

SEQ ID NO: 144998 - protein, 9 aa, Homo sapiens
LFCEEELPN

SEQ ID NO: 144999 - protein, 9 aa, Homo sapiens
FCEEELPNE

SEQ ID NO: 145000 - protein, 9 aa, Homo sapiens
CEEELPNEL

SEQ ID NO: 145001 - protein, 9 aa, Homo sapiens
EEELPNELQ

SEQ ID NO: 145002 - protein, 9 aa, Homo sapiens
EELPNELQE

SEQ ID NO: 145003 - protein, 9 aa, Homo sapiens
ELPNELQET

SEQ ID NO: 145004 - protein, 9 aa, Homo sapiens
LPNELQETE

SEQ ID NO: 145005 - protein, 9 aa, Homo sapiens
PNELQETEV

SEQ ID NO: 145006 - protein, 9 aa, Homo sapiens
NELQETEVE

SEQ ID NO: 145007 - protein, 9 aa, Homo sapiens
ELQETEVEL

SEQ ID NO: 145008 - protein, 9 aa, Homo sapiens
LQETEVELH

SEQ ID NO: 145009 - protein, 9 aa, Homo sapiens
QETEVELHI

SEQ ID NO: 145010 - protein, 9 aa, Homo sapiens
ETEVELHIE

SEQ ID NO: 145011 - protein, 9 aa, Homo sapiens
TEVELHIER

SEQ ID NO: 145012 - protein, 9 aa, Homo sapiens
EVELHIERT

SEQ ID NO: 145013 - protein, 9 aa, Homo sapiens
VELHIERTA

SEQ ID NO: 145014 - protein, 9 aa, Homo sapiens
ELHIERTAY

SEQ ID NO: 145015 - protein, 9 aa, Homo sapiens
LHIERTAYK

SEQ ID NO: 145016 - protein, 9 aa, Homo sapiens
HIERTAYKV

SEQ ID NO: 145017 - protein, 9 aa, Homo sapiens
IERTAYKVV

SEQ ID NO: 145018 - protein, 9 aa, Homo sapiens
ERTAYKVVV

SEQ ID NO: 145019 - protein, 9 aa, Homo sapiens
RTAYKVVVP

SEQ ID NO: 145020 - protein, 9 aa, Homo sapiens
TAYKVVVPC

SEQ ID NO: 145021 - protein, 9 aa, Homo sapiens
AYKVVVPCG

SEQ ID NO: 145022 - protein, 9 aa, Homo sapiens
YKVVVPCGC

SEQ ID NO: 145023 - protein, 9 aa, Homo sapiens
KVVVPCGCC

SEQ ID NO: 145024 - protein, 9 aa, Homo sapiens
VVVPCGCCK

SEQ ID NO: 145025 - protein, 9 aa, Homo sapiens
VVPCGCCKV

SEQ ID NO: 145026 - protein, 9 aa, Homo sapiens
VPCGCCKVK

SEQ ID NO: 145027 - protein, 9 aa, Homo sapiens
PCGCCKVKL

SEQ ID NO: 145028 - protein, 9 aa, Homo sapiens
CGCCKVKLR

SEQ ID NO: 145029 - protein, 9 aa, Homo sapiens
GCCKVKLRI

SEQ ID NO: 145030 - protein, 9 aa, Homo sapiens
CCKVKLRIF

SEQ ID NO: 145031 - protein, 9 aa, Homo sapiens
CKVKLRIFI

SEQ ID NO: 145032 - protein, 9 aa, Homo sapiens
KVKLRIFIT

SEQ ID NO: 145033 - protein, 9 aa, Homo sapiens
VKLRIFITA

SEQ ID NO: 145034 - protein, 9 aa, Homo sapiens
KLRIFITAT

SEQ ID NO: 145035 - protein, 9 aa, Homo sapiens
LRIFITATE

SEQ ID NO: 145036 - protein, 9 aa, Homo sapiens
RIFITATEF

SEQ ID NO: 145037 - protein, 9 aa, Homo sapiens
IFITATEFA

SEQ ID NO: 145038 - protein, 9 aa, Homo sapiens
FITATEFAL

SEQ ID NO: 145039 - protein, 9 aa, Homo sapiens
ITATEFALR

SEQ ID NO: 145040 - protein, 9 aa, Homo sapiens
TATEFALRT

SEQ ID NO: 145041 - protein, 9 aa, Homo sapiens
ATEFALRTF

SEQ ID NO: 145042 - protein, 9 aa, Homo sapiens
TEFALRTFQ

SEQ ID NO: 145043 - protein, 9 aa, Homo sapiens
EFALRTFQN

SEQ ID NO: 145044 - protein, 9 aa, Homo sapiens
FALRTFQNL

SEQ ID NO: 145045 - protein, 9 aa, Homo sapiens
ALRTFQNLL

SEQ ID NO: 145046 - protein, 9 aa, Homo sapiens
LRTFQNLLF

SEQ ID NO: 145047 - protein, 9 aa, Homo sapiens
RTFQNLLFE

SEQ ID NO: 145048 - protein, 9 aa, Homo sapiens
TFQNLLFEQ

SEQ ID NO: 145049 - protein, 9 aa, Homo sapiens
FQNLLFEQL

SEQ ID NO: 145050 - protein, 9 aa, Homo sapiens
QNLLFEQLQ

SEQ ID NO: 145051 - protein, 9 aa, Homo sapiens
NLLFEQLQL

SEQ ID NO: 145052 - protein, 9 aa, Homo sapiens
LLFEQLQLL

SEQ ID NO: 145053 - protein, 9 aa, Homo sapiens
LFEQLQLLC

SEQ ID NO: 145054 - protein, 9 aa, Homo sapiens
FEQLQLLCP

SEQ ID NO: 145055 - protein, 9 aa, Homo sapiens
EQLQLLCPE

SEQ ID NO: 145056 - protein, 9 aa, Homo sapiens
QLQLLCPEC

SEQ ID NO: 145057 - protein, 9 aa, Homo sapiens
LQLLCPECR

SEQ ID NO: 145058 - protein, 9 aa, Homo sapiens
QLLCPECRG

SEQ ID NO: 145059 - protein, 9 aa, Homo sapiens
LLCPECRGN

SEQ ID NO: 145060 - protein, 9 aa, Homo sapiens
LCPECRGNC

SEQ ID NO: 145061 - protein, 9 aa, Homo sapiens
CPECRGNCK

SEQ ID NO: 145062 - protein, 9 aa, Homo sapiens
PECRGNCKH

SEQ ID NO: 145063 - protein, 9 aa, Homo sapiens
ECRGNCKHG

SEQ ID NO: 145064 - protein, 9 aa, Homo sapiens
CRGNCKHGG

SEQ ID NO: 145065 - protein, 9 aa, Homo sapiens
RGNCKHGGS

SEQ ID NO: 145066 - protein, 9 aa, Homo sapiens
MHGDTPTLH

SEQ ID NO: 145067 - protein, 9 aa, Homo sapiens
HGDTPTLHE

SEQ ID NO: 145068 - protein, 9 aa, Homo sapiens
GDTPTLHEY

SEQ ID NO: 145069 - protein, 9 aa, Homo sapiens
DTPTLHEYM

SEQ ID NO: 145070 - protein, 9 aa, Homo sapiens
TPTLHEYML

SEQ ID NO: 145071 - protein, 9 aa, Homo sapiens
PTLHEYMLD

SEQ ID NO: 145072 - protein, 9 aa, Homo sapiens
TLHEYMLDL

SEQ ID NO: 145073 - protein, 9 aa, Homo sapiens
LHEYMLDLQ

SEQ ID NO: 145074 - protein, 9 aa, Homo sapiens
HEYMLDLQP

SEQ ID NO: 145075 - protein, 9 aa, Homo sapiens
EYMLDLQPE

SEQ ID NO: 145076 - protein, 9 aa, Homo sapiens
YMLDLQPET

SEQ ID NO: 145077 - protein, 9 aa, Homo sapiens
MLDLQPETT

SEQ ID NO: 145078 - protein, 9 aa, Homo sapiens
LDLQPETTD

SEQ ID NO: 145079 - protein, 9 aa, Homo sapiens
DLQPETTDL

SEQ ID NO: 145080 - protein, 9 aa, Homo sapiens
LQPETTDLY

SEQ ID NO: 145081 - protein, 9 aa, Homo sapiens
QPETTDLYC

SEQ ID NO: 145082 - protein, 9 aa, Homo sapiens
PETTDLYCY

SEQ ID NO: 145083 - protein, 9 aa, Homo sapiens
ETTDLYCYE

SEQ ID NO: 145084 - protein, 9 aa, Homo sapiens
TTDLYCYEQ

SEQ ID NO: 145085 - protein, 9 aa, Homo sapiens
TDLYCYEQL

SEQ ID NO: 145086 - protein, 9 aa, Homo sapiens
DLYCYEQLN

SEQ ID NO: 145087 - protein, 9 aa, Homo sapiens
LYCYEQLND

SEQ ID NO: 145088 - protein, 9 aa, Homo sapiens
YCYEQLNDS

SEQ ID NO: 145089 - protein, 9 aa, Homo sapiens
CYEQLNDSS

SEQ ID NO: 145090 - protein, 9 aa, Homo sapiens
YEQLNDSSE

SEQ ID NO: 145091 - protein, 9 aa, Homo sapiens
EQLNDSSEE

SEQ ID NO: 145092 - protein, 9 aa, Homo sapiens
QLNDSSEEE

SEQ ID NO: 145093 - protein, 9 aa, Homo sapiens
LNDSSEEED

SEQ ID NO: 145094 - protein, 9 aa, Homo sapiens
NDSSEEEDE

SEQ ID NO: 145095 - protein, 9 aa, Homo sapiens
DSSEEEDEI

SEQ ID NO: 145096 - protein, 9 aa, Homo sapiens
SSEEEDEID

SEQ ID NO: 145097 - protein, 9 aa, Homo sapiens
SEEEDEIDG

SEQ ID NO: 145098 - protein, 9 aa, Homo sapiens
EEEDEIDGP

SEQ ID NO: 145099 - protein, 9 aa, Homo sapiens
EEDEIDGPA

SEQ ID NO: 145100 - protein, 9 aa, Homo sapiens
EDEIDGPAG

SEQ ID NO: 145101 - protein, 9 aa, Homo sapiens
DEIDGPAGQ

SEQ ID NO: 145102 - protein, 9 aa, Homo sapiens
EIDGPAGQA

SEQ ID NO: 145103 - protein, 9 aa, Homo sapiens
IDGPAGQAE

SEQ ID NO: 145104 - protein, 9 aa, Homo sapiens
DGPAGQAEP

SEQ ID NO: 145105 - protein, 9 aa, Homo sapiens
GPAGQAEPD

SEQ ID NO: 145106 - protein, 9 aa, Homo sapiens
PAGQAEPDR

SEQ ID NO: 145107 - protein, 9 aa, Homo sapiens
AGQAEPDRA

SEQ ID NO: 145108 - protein, 9 aa, Homo sapiens
GQAEPDRAH

SEQ ID NO: 145109 - protein, 9 aa, Homo sapiens
QAEPDRAHY

SEQ ID NO: 145110 - protein, 9 aa, Homo sapiens
AEPDRAHYN

SEQ ID NO: 145111 - protein, 9 aa, Homo sapiens
EPDRAHYNI

SEQ ID NO: 145112 - protein, 9 aa, Homo sapiens
PDRAHYNIV

SEQ ID NO: 145113 - protein, 9 aa, Homo sapiens
DRAHYNIVT

SEQ ID NO: 145114 - protein, 9 aa, Homo sapiens
RAHYNIVTF

SEQ ID NO: 145115 - protein, 9 aa, Homo sapiens
AHYNIVTFC

SEQ ID NO: 145116 - protein, 9 aa, Homo sapiens
HYNIVTFCC

SEQ ID NO: 145117 - protein, 9 aa, Homo sapiens
YNIVTFCCK

SEQ ID NO: 145118 - protein, 9 aa, Homo sapiens
NIVTFCCKC

SEQ ID NO: 145119 - protein, 9 aa, Homo sapiens
IVTFCCKCD

SEQ ID NO: 145120 - protein, 9 aa, Homo sapiens
VTFCCKCDS

SEQ ID NO: 145121 - protein, 9 aa, Homo sapiens
TFCCKCDST

SEQ ID NO: 145122 - protein, 9 aa, Homo sapiens
FCCKCDSTL

SEQ ID NO: 145123 - protein, 9 aa, Homo sapiens
CCKCDSTLR

SEQ ID NO: 145124 - protein, 9 aa, Homo sapiens
CKCDSTLRL

SEQ ID NO: 145125 - protein, 9 aa, Homo sapiens
KCDSTLRLC

SEQ ID NO: 145126 - protein, 9 aa, Homo sapiens
CDSTLRLCV

SEQ ID NO: 145127 - protein, 9 aa, Homo sapiens
DSTLRLCVQ

SEQ ID NO: 145128 - protein, 9 aa, Homo sapiens
STLRLCVQS

SEQ ID NO: 145129 - protein, 9 aa, Homo sapiens
TLRLCVQST

SEQ ID NO: 145130 - protein, 9 aa, Homo sapiens
LRLCVQSTH

SEQ ID NO: 145131 - protein, 9 aa, Homo sapiens
RLCVQSTHV

SEQ ID NO: 145132 - protein, 9 aa, Homo sapiens
LCVQSTHVD

SEQ ID NO: 145133 - protein, 9 aa, Homo sapiens
CVQSTHVDI

SEQ ID NO: 145134 - protein, 9 aa, Homo sapiens
VQSTHVDIR

SEQ ID NO: 145135 - protein, 9 aa, Homo sapiens
QSTHVDIRT

SEQ ID NO: 145136 - protein, 9 aa, Homo sapiens
STHVDIRTL

SEQ ID NO: 145137 - protein, 9 aa, Homo sapiens
THVDIRTLE

SEQ ID NO: 145138 - protein, 9 aa, Homo sapiens
HVDIRTLED

SEQ ID NO: 145139 - protein, 9 aa, Homo sapiens
VDIRTLEDL

SEQ ID NO: 145140 - protein, 9 aa, Homo sapiens
DIRTLEDLL

SEQ ID NO: 145141 - protein, 9 aa, Homo sapiens
IRTLEDLLM

SEQ ID NO: 145142 - protein, 9 aa, Homo sapiens
RTLEDLLMG

SEQ ID NO: 145143 - protein, 9 aa, Homo sapiens
TLEDLLMGT

SEQ ID NO: 145144 - protein, 9 aa, Homo sapiens
LEDLLMGTL

SEQ ID NO: 145145 - protein, 9 aa, Homo sapiens
EDLLMGTLG

SEQ ID NO: 145146 - protein, 9 aa, Homo sapiens
DLLMGTLGI

SEQ ID NO: 145147 - protein, 9 aa, Homo sapiens
LLMGTLGIV

SEQ ID NO: 145148 - protein, 9 aa, Homo sapiens
LMGTLGIVC

SEQ ID NO: 145149 - protein, 9 aa, Homo sapiens
MGTLGIVCP

SEQ ID NO: 145150 - protein, 9 aa, Homo sapiens
GTLGIVCPI

SEQ ID NO: 145151 - protein, 9 aa, Homo sapiens
TLGIVCPIC

SEQ ID NO: 145152 - protein, 9 aa, Homo sapiens
LGIVCPICS

SEQ ID NO: 145153 - protein, 9 aa, Homo sapiens
GIVCPICSQ

SEQ ID NO: 145154 - protein, 9 aa, Homo sapiens
IVCPICSQK

SEQ ID NO: 145155 - protein, 9 aa, Homo sapiens
VCPICSQKP

SEQ ID NO: 145156 - protein, 9 aa, Homo sapiens
MIGKEVTLQ

SEQ ID NO: 145157 - protein, 9 aa, Homo sapiens
IGKEVTLQD

SEQ ID NO: 145158 - protein, 9 aa, Homo sapiens
GKEVTLQDI

SEQ ID NO: 145159 - protein, 9 aa, Homo sapiens
KEVTLQDIV

SEQ ID NO: 145160 - protein, 9 aa, Homo sapiens
EVTLQDIVL

SEQ ID NO: 145161 - protein, 9 aa, Homo sapiens
VTLQDIVLE

SEQ ID NO: 145162 - protein, 9 aa, Homo sapiens
TLQDIVLEL

SEQ ID NO: 145163 - protein, 9 aa, Homo sapiens
LQDIVLELN

SEQ ID NO: 145164 - protein, 9 aa, Homo sapiens
QDIVLELNE

SEQ ID NO: 145165 - protein, 9 aa, Homo sapiens
DIVLELNEL

SEQ ID NO: 145166 - protein, 9 aa, Homo sapiens
IVLELNELQ

SEQ ID NO: 145167 - protein, 9 aa, Homo sapiens
VLELNELQP

SEQ ID NO: 145168 - protein, 9 aa, Homo sapiens
LELNELQPE

SEQ ID NO: 145169 - protein, 9 aa, Homo sapiens
ELNELQPEV

SEQ ID NO: 145170 - protein, 9 aa, Homo sapiens
LNELQPEVQ

SEQ ID NO: 145171 - protein, 9 aa, Homo sapiens
NELQPEVQP

SEQ ID NO: 145172 - protein, 9 aa, Homo sapiens
ELQPEVQPV

SEQ ID NO: 145173 - protein, 9 aa, Homo sapiens
LQPEVQPVD

SEQ ID NO: 145174 - protein, 9 aa, Homo sapiens
QPEVQPVDL

SEQ ID NO: 145175 - protein, 9 aa, Homo sapiens
PEVQPVDLF

SEQ ID NO: 145176 - protein, 9 aa, Homo sapiens
EVQPVDLFC

SEQ ID NO: 145177 - protein, 9 aa, Homo sapiens
VQPVDLFCE

SEQ ID NO: 145178 - protein, 9 aa, Homo sapiens
QPVDLFCEE

SEQ ID NO: 145179 - protein, 9 aa, Homo sapiens
PVDLFCEEE

SEQ ID NO: 145180 - protein, 9 aa, Homo sapiens
VDLFCEEEL

SEQ ID NO: 145181 - protein, 9 aa, Homo sapiens
DLFCEEELP

SEQ ID NO: 145182 - protein, 9 aa, Homo sapiens
LFCEEELPN

SEQ ID NO: 145183 - protein, 9 aa, Homo sapiens
FCEEELPNE

SEQ ID NO: 145184 - protein, 9 aa, Homo sapiens
CEEELPNEQ

SEQ ID NO: 145185 - protein, 9 aa, Homo sapiens
EEELPNEQQ

SEQ ID NO: 145186 - protein, 9 aa, Homo sapiens
EELPNEQQE

SEQ ID NO: 145187 - protein, 9 aa, Homo sapiens
ELPNEQQER

SEQ ID NO: 145188 - protein, 9 aa, Homo sapiens
LPNEQQERE

SEQ ID NO: 145189 - protein, 9 aa, Homo sapiens
PNEQQEREE

SEQ ID NO: 145190 - protein, 9 aa, Homo sapiens
NEQQEREEE

SEQ ID NO: 145191 - protein, 9 aa, Homo sapiens
EQQEREEEP

SEQ ID NO: 145192 - protein, 9 aa, Homo sapiens
QQEREEEPQ

SEQ ID NO: 145193 - protein, 9 aa, Homo sapiens
QEREEEPQI

SEQ ID NO: 145194 - protein, 9 aa, Homo sapiens
EREEEPQIE

SEQ ID NO: 145195 - protein, 9 aa, Homo sapiens
REEEPQIER

SEQ ID NO: 145196 - protein, 9 aa, Homo sapiens
EEEPQIERA

SEQ ID NO: 145197 - protein, 9 aa, Homo sapiens
EEPQIERAS

SEQ ID NO: 145198 - protein, 9 aa, Homo sapiens
EPQIERASY

SEQ ID NO: 145199 - protein, 9 aa, Homo sapiens
PQIERASYK

SEQ ID NO: 145200 - protein, 9 aa, Homo sapiens
QIERASYKV

SEQ ID NO: 145201 - protein, 9 aa, Homo sapiens
IERASYKVV

SEQ ID NO: 145202 - protein, 9 aa, Homo sapiens
ERASYKVVA

SEQ ID NO: 145203 - protein, 9 aa, Homo sapiens
RASYKVVAP

SEQ ID NO: 145204 - protein, 9 aa, Homo sapiens
ASYKVVAPC

SEQ ID NO: 145205 - protein, 9 aa, Homo sapiens
SYKVVAPCG

SEQ ID NO: 145206 - protein, 9 aa, Homo sapiens
YKVVAPCGC

SEQ ID NO: 145207 - protein, 9 aa, Homo sapiens
KVVAPCGCC

SEQ ID NO: 145208 - protein, 9 aa, Homo sapiens
VVAPCGCCK

SEQ ID NO: 145209 - protein, 9 aa, Homo sapiens
VAPCGCCKV

SEQ ID NO: 145210 - protein, 9 aa, Homo sapiens
APCGCCKVK

SEQ ID NO: 145211 - protein, 9 aa, Homo sapiens
PCGCCKVKL

SEQ ID NO: 145212 - protein, 9 aa, Homo sapiens
CGCCKVKLR

SEQ ID NO: 145213 - protein, 9 aa, Homo sapiens
GCCKVKLRI

SEQ ID NO: 145214 - protein, 9 aa, Homo sapiens
CCKVKLRIF

SEQ ID NO: 145215 - protein, 9 aa, Homo sapiens
CKVKLRIFI

SEQ ID NO: 145216 - protein, 9 aa, Homo sapiens
KVKLRIFIS

SEQ ID NO: 145217 - protein, 9 aa, Homo sapiens
VKLRIFISA

SEQ ID NO: 145218 - protein, 9 aa, Homo sapiens
KLRIFISAT

SEQ ID NO: 145219 - protein, 9 aa, Homo sapiens
LRIFISATE

SEQ ID NO: 145220 - protein, 9 aa, Homo sapiens
RIFISATEF

SEQ ID NO: 145221 - protein, 9 aa, Homo sapiens
IFISATEFA

SEQ ID NO: 145222 - protein, 9 aa, Homo sapiens
FISATEFAI

SEQ ID NO: 145223 - protein, 9 aa, Homo sapiens
ISATEFAIR

SEQ ID NO: 145224 - protein, 9 aa, Homo sapiens
SATEFAIRS

SEQ ID NO: 145225 - protein, 9 aa, Homo sapiens
ATEFAIRSF

SEQ ID NO: 145226 - protein, 9 aa, Homo sapiens
TEFAIRSFQ

SEQ ID NO: 145227 - protein, 9 aa, Homo sapiens
EFAIRSFQQ

SEQ ID NO: 145228 - protein, 9 aa, Homo sapiens
FAIRSFQQL

SEQ ID NO: 145229 - protein, 9 aa, Homo sapiens
AIRSFQQLL

SEQ ID NO: 145230 - protein, 9 aa, Homo sapiens
IRSFQQLLI

SEQ ID NO: 145231 - protein, 9 aa, Homo sapiens
RSFQQLLID

SEQ ID NO: 145232 - protein, 9 aa, Homo sapiens
SFQQLLIDE

SEQ ID NO: 145233 - protein, 9 aa, Homo sapiens
FQQLLIDEL

SEQ ID NO: 145234 - protein, 9 aa, Homo sapiens
QQLLIDELQ

SEQ ID NO: 145235 - protein, 9 aa, Homo sapiens
QLLIDELQL

SEQ ID NO: 145236 - protein, 9 aa, Homo sapiens
LLIDELQLL

SEQ ID NO: 145237 - protein, 9 aa, Homo sapiens
LIDELQLLC

SEQ ID NO: 145238 - protein, 9 aa, Homo sapiens
IDELQLLCP

SEQ ID NO: 145239 - protein, 9 aa, Homo sapiens
DELQLLCPD

SEQ ID NO: 145240 - protein, 9 aa, Homo sapiens
ELQLLCPDC

SEQ ID NO: 145241 - protein, 9 aa, Homo sapiens
LQLLCPDCR

SEQ ID NO: 145242 - protein, 9 aa, Homo sapiens
QLLCPDCRG

SEQ ID NO: 145243 - protein, 9 aa, Homo sapiens
LLCPDCRGN

SEQ ID NO: 145244 - protein, 9 aa, Homo sapiens
LCPDCRGNC

SEQ ID NO: 145245 - protein, 9 aa, Homo sapiens
CPDCRGNCK

SEQ ID NO: 145246 - protein, 9 aa, Homo sapiens
PDCRGNCKH

SEQ ID NO: 145247 - protein, 9 aa, Homo sapiens
DCRGNCKHG

SEQ ID NO: 145248 - protein, 9 aa, Homo sapiens
CRGNCKHGG

SEQ ID NO: 145249 - protein, 9 aa, Homo sapiens
RGNCKHGGS

SEQ ID NO: 145250 - protein, 9 aa, Homo sapiens
MIGKEVTLQ

SEQ ID NO: 145251 - protein, 9 aa, Homo sapiens
IGKEVTLQD

SEQ ID NO: 145252 - protein, 9 aa, Homo sapiens
GKEVTLQDI

SEQ ID NO: 145253 - protein, 9 aa, Homo sapiens
KEVTLQDIV

SEQ ID NO: 145254 - protein, 9 aa, Homo sapiens
EVTLQDIVL

SEQ ID NO: 145255 - protein, 9 aa, Homo sapiens
VTLQDIVLE

SEQ ID NO: 145256 - protein, 9 aa, Homo sapiens
TLQDIVLEL

SEQ ID NO: 145257 - protein, 9 aa, Homo sapiens
LQDIVLELN

SEQ ID NO: 145258 - protein, 9 aa, Homo sapiens
QDIVLELNE

SEQ ID NO: 145259 - protein, 9 aa, Homo sapiens
DIVLELNEL

SEQ ID NO: 145260 - protein, 9 aa, Homo sapiens
IVLELNELQ

SEQ ID NO: 145261 - protein, 9 aa, Homo sapiens
VLELNELQP

SEQ ID NO: 145262 - protein, 9 aa, Homo sapiens
LELNELQPE

SEQ ID NO: 145263 - protein, 9 aa, Homo sapiens
ELNELQPEV

SEQ ID NO: 145264 - protein, 9 aa, Homo sapiens
LNELQPEVQ

SEQ ID NO: 145265 - protein, 9 aa, Homo sapiens
NELQPEVQP

SEQ ID NO: 145266 - protein, 9 aa, Homo sapiens
ELQPEVQPV

SEQ ID NO: 145267 - protein, 9 aa, Homo sapiens
LQPEVQPVD

SEQ ID NO: 145268 - protein, 9 aa, Homo sapiens
QPEVQPVDL

SEQ ID NO: 145269 - protein, 9 aa, Homo sapiens
PEVQPVDLF

SEQ ID NO: 145270 - protein, 9 aa, Homo sapiens
EVQPVDLFC

SEQ ID NO: 145271 - protein, 9 aa, Homo sapiens
VQPVDLFCE

SEQ ID NO: 145272 - protein, 9 aa, Homo sapiens
QPVDLFCEE

SEQ ID NO: 145273 - protein, 9 aa, Homo sapiens
PVDLFCEEE

SEQ ID NO: 145274 - protein, 9 aa, Homo sapiens
VDLFCEEEL

SEQ ID NO: 145275 - protein, 9 aa, Homo sapiens
DLFCEEELP

SEQ ID NO: 145276 - protein, 9 aa, Homo sapiens
LFCEEELPS

SEQ ID NO: 145277 - protein, 9 aa, Homo sapiens
FCEEELPSE

SEQ ID NO: 145278 - protein, 9 aa, Homo sapiens
CEEELPSEQ

SEQ ID NO: 145279 - protein, 9 aa, Homo sapiens
EEELPSEQQ

SEQ ID NO: 145280 - protein, 9 aa, Homo sapiens
EELPSEQQE

SEQ ID NO: 145281 - protein, 9 aa, Homo sapiens
ELPSEQQET

SEQ ID NO: 145282 - protein, 9 aa, Homo sapiens
LPSEQQETE

SEQ ID NO: 145283 - protein, 9 aa, Homo sapiens
PSEQQETEE

SEQ ID NO: 145284 - protein, 9 aa, Homo sapiens
SEQQETEEE

SEQ ID NO: 145285 - protein, 9 aa, Homo sapiens
EQQETEEEL

SEQ ID NO: 145286 - protein, 9 aa, Homo sapiens
QQETEEELP

SEQ ID NO: 145287 - protein, 9 aa, Homo sapiens
QETEEELPE

SEQ ID NO: 145288 - protein, 9 aa, Homo sapiens
ETEEELPER

SEQ ID NO: 145289 - protein, 9 aa, Homo sapiens
TEEELPERT

SEQ ID NO: 145290 - protein, 9 aa, Homo sapiens
EEELPERTS

SEQ ID NO: 145291 - protein, 9 aa, Homo sapiens
EELPERTSY

SEQ ID NO: 145292 - protein, 9 aa, Homo sapiens
ELPERTSYK

SEQ ID NO: 145293 - protein, 9 aa, Homo sapiens
LPERTSYKV

SEQ ID NO: 145294 - protein, 9 aa, Homo sapiens
PERTSYKVV

SEQ ID NO: 145295 - protein, 9 aa, Homo sapiens
ERTSYKVVT

SEQ ID NO: 145296 - protein, 9 aa, Homo sapiens
RTSYKVVTP

SEQ ID NO: 145297 - protein, 9 aa, Homo sapiens
TSYKVVTPC

SEQ ID NO: 145298 - protein, 9 aa, Homo sapiens
SYKVVTPCG

SEQ ID NO: 145299 - protein, 9 aa, Homo sapiens
YKVVTPCGC

SEQ ID NO: 145300 - protein, 9 aa, Homo sapiens
KVVTPCGCC

SEQ ID NO: 145301 - protein, 9 aa, Homo sapiens
VVTPCGCCK

SEQ ID NO: 145302 - protein, 9 aa, Homo sapiens
VTPCGCCKV

SEQ ID NO: 145303 - protein, 9 aa, Homo sapiens
TPCGCCKVK

SEQ ID NO: 145304 - protein, 9 aa, Homo sapiens
PCGCCKVKL

SEQ ID NO: 145305 - protein, 9 aa, Homo sapiens
CGCCKVKLR

SEQ ID NO: 145306 - protein, 9 aa, Homo sapiens
GCCKVKLRI

SEQ ID NO: 145307 - protein, 9 aa, Homo sapiens
CCKVKLRIF

SEQ ID NO: 145308 - protein, 9 aa, Homo sapiens
CKVKLRIFV

SEQ ID NO: 145309 - protein, 9 aa, Homo sapiens
KVKLRIFVN

SEQ ID NO: 145310 - protein, 9 aa, Homo sapiens
VKLRIFVNA

SEQ ID NO: 145311 - protein, 9 aa, Homo sapiens
KLRIFVNAT

SEQ ID NO: 145312 - protein, 9 aa, Homo sapiens
LRIFVNATR

SEQ ID NO: 145313 - protein, 9 aa, Homo sapiens
RIFVNATRF

SEQ ID NO: 145314 - protein, 9 aa, Homo sapiens
IFVNATRFA

SEQ ID NO: 145315 - protein, 9 aa, Homo sapiens
FVNATRFAI

SEQ ID NO: 145316 - protein, 9 aa, Homo sapiens
VNATRFAIR

SEQ ID NO: 145317 - protein, 9 aa, Homo sapiens
NATRFAIRT

SEQ ID NO: 145318 - protein, 9 aa, Homo sapiens
ATRFAIRTF

SEQ ID NO: 145319 - protein, 9 aa, Homo sapiens
TRFAIRTFQ

SEQ ID NO: 145320 - protein, 9 aa, Homo sapiens
RFAIRTFQN

SEQ ID NO: 145321 - protein, 9 aa, Homo sapiens
FAIRTFQNL

SEQ ID NO: 145322 - protein, 9 aa, Homo sapiens
AIRTFQNLL

SEQ ID NO: 145323 - protein, 9 aa, Homo sapiens
IRTFQNLLF

SEQ ID NO: 145324 - protein, 9 aa, Homo sapiens
RTFQNLLFE

SEQ ID NO: 145325 - protein, 9 aa, Homo sapiens
TFQNLLFEE

SEQ ID NO: 145326 - protein, 9 aa, Homo sapiens
FQNLLFEEL

SEQ ID NO: 145327 - protein, 9 aa, Homo sapiens
QNLLFEELQ

SEQ ID NO: 145328 - protein, 9 aa, Homo sapiens
NLLFEELQL

SEQ ID NO: 145329 - protein, 9 aa, Homo sapiens
LLFEELQLL

SEQ ID NO: 145330 - protein, 9 aa, Homo sapiens
LFEELQLLC

SEQ ID NO: 145331 - protein, 9 aa, Homo sapiens
FEELQLLCP

SEQ ID NO: 145332 - protein, 9 aa, Homo sapiens
EELQLLCPE

SEQ ID NO: 145333 - protein, 9 aa, Homo sapiens
ELQLLCPEC

SEQ ID NO: 145334 - protein, 9 aa, Homo sapiens
LQLLCPECR

SEQ ID NO: 145335 - protein, 9 aa, Homo sapiens
QLLCPECRG

SEQ ID NO: 145336 - protein, 9 aa, Homo sapiens
LLCPECRGN

SEQ ID NO: 145337 - protein, 9 aa, Homo sapiens
LCPECRGNC

SEQ ID NO: 145338 - protein, 9 aa, Homo sapiens
CPECRGNCK

SEQ ID NO: 145339 - protein, 9 aa, Homo sapiens
PECRGNCKH

SEQ ID NO: 145340 - protein, 9 aa, Homo sapiens
ECRGNCKHG

SEQ ID NO: 145341 - protein, 9 aa, Homo sapiens
CRGNCKHGG

SEQ ID NO: 145342 - protein, 9 aa, Homo sapiens
RGNCKHGGS

SEQ ID NO: 145343 - protein, 9 aa, Homo sapiens
MIGKEVTLQ

SEQ ID NO: 145344 - protein, 9 aa, Homo sapiens
IGKEVTLQD

SEQ ID NO: 145345 - protein, 9 aa, Homo sapiens
GKEVTLQDI

SEQ ID NO: 145346 - protein, 9 aa, Homo sapiens
KEVTLQDIV

SEQ ID NO: 145347 - protein, 9 aa, Homo sapiens
EVTLQDIVL

SEQ ID NO: 145348 - protein, 9 aa, Homo sapiens
VTLQDIVLE

SEQ ID NO: 145349 - protein, 9 aa, Homo sapiens
TLQDIVLEL

SEQ ID NO: 145350 - protein, 9 aa, Homo sapiens
LQDIVLELN

SEQ ID NO: 145351 - protein, 9 aa, Homo sapiens
QDIVLELNE

SEQ ID NO: 145352 - protein, 9 aa, Homo sapiens
DIVLELNEL

SEQ ID NO: 145353 - protein, 9 aa, Homo sapiens
IVLELNELQ

SEQ ID NO: 145354 - protein, 9 aa, Homo sapiens
VLELNELQP

SEQ ID NO: 145355 - protein, 9 aa, Homo sapiens
LELNELQPE

SEQ ID NO: 145356 - protein, 9 aa, Homo sapiens
ELNELQPEV

SEQ ID NO: 145357 - protein, 9 aa, Homo sapiens
LNELQPEVQ

SEQ ID NO: 145358 - protein, 9 aa, Homo sapiens
NELQPEVQP

SEQ ID NO: 145359 - protein, 9 aa, Homo sapiens
ELQPEVQPV

SEQ ID NO: 145360 - protein, 9 aa, Homo sapiens
LQPEVQPVD

SEQ ID NO: 145361 - protein, 9 aa, Homo sapiens
QPEVQPVDL

SEQ ID NO: 145362 - protein, 9 aa, Homo sapiens
PEVQPVDLF

SEQ ID NO: 145363 - protein, 9 aa, Homo sapiens
EVQPVDLFC

SEQ ID NO: 145364 - protein, 9 aa, Homo sapiens
VQPVDLFCE

SEQ ID NO: 145365 - protein, 9 aa, Homo sapiens
QPVDLFCEE

SEQ ID NO: 145366 - protein, 9 aa, Homo sapiens
PVDLFCEEE

SEQ ID NO: 145367 - protein, 9 aa, Homo sapiens
VDLFCEEEL

SEQ ID NO: 145368 - protein, 9 aa, Homo sapiens
DLFCEEELP

SEQ ID NO: 145369 - protein, 9 aa, Homo sapiens
LFCEEELPS

SEQ ID NO: 145370 - protein, 9 aa, Homo sapiens
FCEEELPSE

SEQ ID NO: 145371 - protein, 9 aa, Homo sapiens
CEEELPSEQ

SEQ ID NO: 145372 - protein, 9 aa, Homo sapiens
EEELPSEQQ

SEQ ID NO: 145373 - protein, 9 aa, Homo sapiens
EELPSEQQE

SEQ ID NO: 145374 - protein, 9 aa, Homo sapiens
ELPSEQQET

SEQ ID NO: 145375 - protein, 9 aa, Homo sapiens
LPSEQQETE

SEQ ID NO: 145376 - protein, 9 aa, Homo sapiens
PSEQQETEE

SEQ ID NO: 145377 - protein, 9 aa, Homo sapiens
SEQQETEEE

SEQ ID NO: 145378 - protein, 9 aa, Homo sapiens
EQQETEEEL

SEQ ID NO: 145379 - protein, 9 aa, Homo sapiens
QQETEEELP

SEQ ID NO: 145380 - protein, 9 aa, Homo sapiens
QETEEELPE

SEQ ID NO: 145381 - protein, 9 aa, Homo sapiens
ETEEELPER

SEQ ID NO: 145382 - protein, 9 aa, Homo sapiens
TEEELPERT

SEQ ID NO: 145383 - protein, 9 aa, Homo sapiens
EEELPERTS

SEQ ID NO: 145384 - protein, 9 aa, Homo sapiens
EELPERTSY

SEQ ID NO: 145385 - protein, 9 aa, Homo sapiens
ELPERTSYK

SEQ ID NO: 145386 - protein, 9 aa, Homo sapiens
LPERTSYKV

SEQ ID NO: 145387 - protein, 9 aa, Homo sapiens
PERTSYKVV

SEQ ID NO: 145388 - protein, 9 aa, Homo sapiens
ERTSYKVVT

SEQ ID NO: 145389 - protein, 9 aa, Homo sapiens
RTSYKVVTP

SEQ ID NO: 145390 - protein, 9 aa, Homo sapiens
TSYKVVTPC

SEQ ID NO: 145391 - protein, 9 aa, Homo sapiens
SYKVVTPCG

SEQ ID NO: 145392 - protein, 9 aa, Homo sapiens
YKVVTPCGC

SEQ ID NO: 145393 - protein, 9 aa, Homo sapiens
KVVTPCGCC

SEQ ID NO: 145394 - protein, 9 aa, Homo sapiens
VVTPCGCCK

SEQ ID NO: 145395 - protein, 9 aa, Homo sapiens
VTPCGCCKV

SEQ ID NO: 145396 - protein, 9 aa, Homo sapiens
TPCGCCKVK

SEQ ID NO: 145397 - protein, 9 aa, Homo sapiens
PCGCCKVKL

SEQ ID NO: 145398 - protein, 9 aa, Homo sapiens
CGCCKVKLR

SEQ ID NO: 145399 - protein, 9 aa, Homo sapiens
GCCKVKLRI

SEQ ID NO: 145400 - protein, 9 aa, Homo sapiens
CCKVKLRIF

SEQ ID NO: 145401 - protein, 9 aa, Homo sapiens
CKVKLRIFV

SEQ ID NO: 145402 - protein, 9 aa, Homo sapiens
KVKLRIFVN

SEQ ID NO: 145403 - protein, 9 aa, Homo sapiens
VKLRIFVNA

SEQ ID NO: 145404 - protein, 9 aa, Homo sapiens
KLRIFVNAT

SEQ ID NO: 145405 - protein, 9 aa, Homo sapiens
LRIFVNATR

SEQ ID NO: 145406 - protein, 9 aa, Homo sapiens
RIFVNATRF

SEQ ID NO: 145407 - protein, 9 aa, Homo sapiens
IFVNATRFA

SEQ ID NO: 145408 - protein, 9 aa, Homo sapiens
FVNATRFAI

SEQ ID NO: 145409 - protein, 9 aa, Homo sapiens
VNATRFAIR

SEQ ID NO: 145410 - protein, 9 aa, Homo sapiens
NATRFAIRT

SEQ ID NO: 145411 - protein, 9 aa, Homo sapiens
ATRFAIRTF

SEQ ID NO: 145412 - protein, 9 aa, Homo sapiens
TRFAIRTFQ

SEQ ID NO: 145413 - protein, 9 aa, Homo sapiens
RFAIRTFQN

SEQ ID NO: 145414 - protein, 9 aa, Homo sapiens
FAIRTFQNL

SEQ ID NO: 145415 - protein, 9 aa, Homo sapiens
AIRTFQNLL

SEQ ID NO: 145416 - protein, 9 aa, Homo sapiens
IRTFQNLLF

SEQ ID NO: 145417 - protein, 9 aa, Homo sapiens
RTFQNLLFE

SEQ ID NO: 145418 - protein, 9 aa, Homo sapiens
TFQNLLFEE

SEQ ID NO: 145419 - protein, 9 aa, Homo sapiens
FQNLLFEEL

SEQ ID NO: 145420 - protein, 9 aa, Homo sapiens
QNLLFEELQ

SEQ ID NO: 145421 - protein, 9 aa, Homo sapiens
NLLFEELQL

SEQ ID NO: 145422 - protein, 9 aa, Homo sapiens
LLFEELQLL

SEQ ID NO: 145423 - protein, 9 aa, Homo sapiens
LFEELQLLC

SEQ ID NO: 145424 - protein, 9 aa, Homo sapiens
FEELQLLCP

SEQ ID NO: 145425 - protein, 9 aa, Homo sapiens
EELQLLCPE

SEQ ID NO: 145426 - protein, 9 aa, Homo sapiens
ELQLLCPEC

SEQ ID NO: 145427 - protein, 9 aa, Homo sapiens
LQLLCPECR

SEQ ID NO: 145428 - protein, 9 aa, Homo sapiens
QLLCPECRG

SEQ ID NO: 145429 - protein, 9 aa, Homo sapiens
LLCPECRGN

SEQ ID NO: 145430 - protein, 9 aa, Homo sapiens
LCPECRGNC

SEQ ID NO: 145431 - protein, 9 aa, Homo sapiens
CPECRGNCK

SEQ ID NO: 145432 - protein, 9 aa, Homo sapiens
PECRGNCKH

SEQ ID NO: 145433 - protein, 9 aa, Homo sapiens
ECRGNCKHG

SEQ ID NO: 145434 - protein, 9 aa, Homo sapiens
CRGNCKHGG

SEQ ID NO: 145435 - protein, 9 aa, Homo sapiens
RGNCKHGGS

SEQ ID NO: 145436 - protein, 9 aa, Homo sapiens
MHGTRPSLA

SEQ ID NO: 145437 - protein, 9 aa, Homo sapiens
HGTRPSLAD

SEQ ID NO: 145438 - protein, 9 aa, Homo sapiens
GTRPSLADI

SEQ ID NO: 145439 - protein, 9 aa, Homo sapiens
TRPSLADIT

SEQ ID NO: 145440 - protein, 9 aa, Homo sapiens
RPSLADITL

SEQ ID NO: 145441 - protein, 9 aa, Homo sapiens
PSLADITLI

SEQ ID NO: 145442 - protein, 9 aa, Homo sapiens
SLADITLIL

SEQ ID NO: 145443 - protein, 9 aa, Homo sapiens
LADITLILE

SEQ ID NO: 145444 - protein, 9 aa, Homo sapiens
ADITLILEE

SEQ ID NO: 145445 - protein, 9 aa, Homo sapiens
DITLILEEI

SEQ ID NO: 145446 - protein, 9 aa, Homo sapiens
ITLILEEIP

SEQ ID NO: 145447 - protein, 9 aa, Homo sapiens
TLILEEIPE

SEQ ID NO: 145448 - protein, 9 aa, Homo sapiens
LILEEIPEI

SEQ ID NO: 145449 - protein, 9 aa, Homo sapiens
ILEEIPEII

SEQ ID NO: 145450 - protein, 9 aa, Homo sapiens
LEEIPEIID

SEQ ID NO: 145451 - protein, 9 aa, Homo sapiens
EEIPEIIDL

SEQ ID NO: 145452 - protein, 9 aa, Homo sapiens
EIPEIIDLH

SEQ ID NO: 145453 - protein, 9 aa, Homo sapiens
IPEIIDLHC

SEQ ID NO: 145454 - protein, 9 aa, Homo sapiens
PEIIDLHCD

SEQ ID NO: 145455 - protein, 9 aa, Homo sapiens
EIIDLHCDE

SEQ ID NO: 145456 - protein, 9 aa, Homo sapiens
IIDLHCDEQ

SEQ ID NO: 145457 - protein, 9 aa, Homo sapiens
IDLHCDEQF

SEQ ID NO: 145458 - protein, 9 aa, Homo sapiens
DLHCDEQFD

SEQ ID NO: 145459 - protein, 9 aa, Homo sapiens
LHCDEQFDS

SEQ ID NO: 145460 - protein, 9 aa, Homo sapiens
HCDEQFDSS

SEQ ID NO: 145461 - protein, 9 aa, Homo sapiens
CDEQFDSSE

SEQ ID NO: 145462 - protein, 9 aa, Homo sapiens
DEQFDSSEE

SEQ ID NO: 145463 - protein, 9 aa, Homo sapiens
EQFDSSEEE

SEQ ID NO: 145464 - protein, 9 aa, Homo sapiens
QFDSSEEEN

SEQ ID NO: 145465 - protein, 9 aa, Homo sapiens
FDSSEEENN

SEQ ID NO: 145466 - protein, 9 aa, Homo sapiens
DSSEEENNH

SEQ ID NO: 145467 - protein, 9 aa, Homo sapiens
SSEEENNHQ

SEQ ID NO: 145468 - protein, 9 aa, Homo sapiens
SEEENNHQL

SEQ ID NO: 145469 - protein, 9 aa, Homo sapiens
EEENNHQLT

SEQ ID NO: 145470 - protein, 9 aa, Homo sapiens
EENNHQLTE

SEQ ID NO: 145471 - protein, 9 aa, Homo sapiens
ENNHQLTEP

SEQ ID NO: 145472 - protein, 9 aa, Homo sapiens
NNHQLTEPA

SEQ ID NO: 145473 - protein, 9 aa, Homo sapiens
NHQLTEPAV

SEQ ID NO: 145474 - protein, 9 aa, Homo sapiens
HQLTEPAVQ

SEQ ID NO: 145475 - protein, 9 aa, Homo sapiens
QLTEPAVQA

SEQ ID NO: 145476 - protein, 9 aa, Homo sapiens
LTEPAVQAY

SEQ ID NO: 145477 - protein, 9 aa, Homo sapiens
TEPAVQAYG

SEQ ID NO: 145478 - protein, 9 aa, Homo sapiens
EPAVQAYGV

SEQ ID NO: 145479 - protein, 9 aa, Homo sapiens
PAVQAYGVV

SEQ ID NO: 145480 - protein, 9 aa, Homo sapiens
AVQAYGVVT

SEQ ID NO: 145481 - protein, 9 aa, Homo sapiens
VQAYGVVTT

SEQ ID NO: 145482 - protein, 9 aa, Homo sapiens
QAYGVVTTC

SEQ ID NO: 145483 - protein, 9 aa, Homo sapiens
AYGVVTTCC

SEQ ID NO: 145484 - protein, 9 aa, Homo sapiens
YGVVTTCCK

SEQ ID NO: 145485 - protein, 9 aa, Homo sapiens
GVVTTCCKC

SEQ ID NO: 145486 - protein, 9 aa, Homo sapiens
VVTTCCKCG

SEQ ID NO: 145487 - protein, 9 aa, Homo sapiens
VTTCCKCGR

SEQ ID NO: 145488 - protein, 9 aa, Homo sapiens
TTCCKCGRA

SEQ ID NO: 145489 - protein, 9 aa, Homo sapiens
TCCKCGRAV

SEQ ID NO: 145490 - protein, 9 aa, Homo sapiens
CCKCGRAVR

SEQ ID NO: 145491 - protein, 9 aa, Homo sapiens
CKCGRAVRL

SEQ ID NO: 145492 - protein, 9 aa, Homo sapiens
KCGRAVRLV

SEQ ID NO: 145493 - protein, 9 aa, Homo sapiens
CGRAVRLVV

SEQ ID NO: 145494 - protein, 9 aa, Homo sapiens
GRAVRLVVE

SEQ ID NO: 145495 - protein, 9 aa, Homo sapiens
RAVRLVVEC

SEQ ID NO: 145496 - protein, 9 aa, Homo sapiens
AVRLVVECG

SEQ ID NO: 145497 - protein, 9 aa, Homo sapiens
VRLVVECGP

SEQ ID NO: 145498 - protein, 9 aa, Homo sapiens
RLVVECGPE

SEQ ID NO: 145499 - protein, 9 aa, Homo sapiens
LVVECGPED

SEQ ID NO: 145500 - protein, 9 aa, Homo sapiens
VVECGPEDI

SEQ ID NO: 145501 - protein, 9 aa, Homo sapiens
VECGPEDIR

SEQ ID NO: 145502 - protein, 9 aa, Homo sapiens
ECGPEDIRD

SEQ ID NO: 145503 - protein, 9 aa, Homo sapiens
CGPEDIRDL

SEQ ID NO: 145504 - protein, 9 aa, Homo sapiens
GPEDIRDLE

SEQ ID NO: 145505 - protein, 9 aa, Homo sapiens
PEDIRDLEQ

SEQ ID NO: 145506 - protein, 9 aa, Homo sapiens
EDIRDLEQL

SEQ ID NO: 145507 - protein, 9 aa, Homo sapiens
DIRDLEQLF

SEQ ID NO: 145508 - protein, 9 aa, Homo sapiens
IRDLEQLFL

SEQ ID NO: 145509 - protein, 9 aa, Homo sapiens
RDLEQLFLK

SEQ ID NO: 145510 - protein, 9 aa, Homo sapiens
DLEQLFLKT

SEQ ID NO: 145511 - protein, 9 aa, Homo sapiens
LEQLFLKTL

SEQ ID NO: 145512 - protein, 9 aa, Homo sapiens
EQLFLKTLT

SEQ ID NO: 145513 - protein, 9 aa, Homo sapiens
QLFLKTLTL

SEQ ID NO: 145514 - protein, 9 aa, Homo sapiens
LFLKTLTLV

SEQ ID NO: 145515 - protein, 9 aa, Homo sapiens
FLKTLTLVC

SEQ ID NO: 145516 - protein, 9 aa, Homo sapiens
LKTLTLVCP

SEQ ID NO: 145517 - protein, 9 aa, Homo sapiens
KTLTLVCPH

SEQ ID NO: 145518 - protein, 9 aa, Homo sapiens
TLTLVCPHC

SEQ ID NO: 145519 - protein, 9 aa, Homo sapiens
LTLVCPHCA

SEQ ID NO: 145520 - protein, 9 aa, Homo sapiens
MRGETPTLQ

SEQ ID NO: 145521 - protein, 9 aa, Homo sapiens
RGETPTLQD

SEQ ID NO: 145522 - protein, 9 aa, Homo sapiens
GETPTLQDY

SEQ ID NO: 145523 - protein, 9 aa, Homo sapiens
ETPTLQDYV

SEQ ID NO: 145524 - protein, 9 aa, Homo sapiens
TPTLQDYVL

SEQ ID NO: 145525 - protein, 9 aa, Homo sapiens
PTLQDYVLD

SEQ ID NO: 145526 - protein, 9 aa, Homo sapiens
TLQDYVLDL

SEQ ID NO: 145527 - protein, 9 aa, Homo sapiens
LQDYVLDLQ

SEQ ID NO: 145528 - protein, 9 aa, Homo sapiens
QDYVLDLQP

SEQ ID NO: 145529 - protein, 9 aa, Homo sapiens
DYVLDLQPK

SEQ ID NO: 145530 - protein, 9 aa, Homo sapiens
YVLDLQPKA

SEQ ID NO: 145531 - protein, 9 aa, Homo sapiens
VLDLQPKAT

SEQ ID NO: 145532 - protein, 9 aa, Homo sapiens
LDLQPKATD

SEQ ID NO: 145533 - protein, 9 aa, Homo sapiens
DLQPKATDL

SEQ ID NO: 145534 - protein, 9 aa, Homo sapiens
LQPKATDLH

SEQ ID NO: 145535 - protein, 9 aa, Homo sapiens
QPKATDLHC

SEQ ID NO: 145536 - protein, 9 aa, Homo sapiens
PKATDLHCY

SEQ ID NO: 145537 - protein, 9 aa, Homo sapiens
KATDLHCYE

SEQ ID NO: 145538 - protein, 9 aa, Homo sapiens
ATDLHCYEQ

SEQ ID NO: 145539 - protein, 9 aa, Homo sapiens
TDLHCYEQL

SEQ ID NO: 145540 - protein, 9 aa, Homo sapiens
DLHCYEQLP

SEQ ID NO: 145541 - protein, 9 aa, Homo sapiens
LHCYEQLPD

SEQ ID NO: 145542 - protein, 9 aa, Homo sapiens
HCYEQLPDS

SEQ ID NO: 145543 - protein, 9 aa, Homo sapiens
CYEQLPDSS

SEQ ID NO: 145544 - protein, 9 aa, Homo sapiens
YEQLPDSSD

SEQ ID NO: 145545 - protein, 9 aa, Homo sapiens
EQLPDSSDE

SEQ ID NO: 145546 - protein, 9 aa, Homo sapiens
QLPDSSDEE

SEQ ID NO: 145547 - protein, 9 aa, Homo sapiens
LPDSSDEED

SEQ ID NO: 145548 - protein, 9 aa, Homo sapiens
PDSSDEEDV

SEQ ID NO: 145549 - protein, 9 aa, Homo sapiens
DSSDEEDVI

SEQ ID NO: 145550 - protein, 9 aa, Homo sapiens
SSDEEDVID

SEQ ID NO: 145551 - protein, 9 aa, Homo sapiens
SDEEDVIDS

SEQ ID NO: 145552 - protein, 9 aa, Homo sapiens
DEEDVIDSP

SEQ ID NO: 145553 - protein, 9 aa, Homo sapiens
EEDVIDSPA

SEQ ID NO: 145554 - protein, 9 aa, Homo sapiens
EDVIDSPAG

SEQ ID NO: 145555 - protein, 9 aa, Homo sapiens
DVIDSPAGQ

SEQ ID NO: 145556 - protein, 9 aa, Homo sapiens
VIDSPAGQA

SEQ ID NO: 145557 - protein, 9 aa, Homo sapiens
IDSPAGQAK

SEQ ID NO: 145558 - protein, 9 aa, Homo sapiens
DSPAGQAKP

SEQ ID NO: 145559 - protein, 9 aa, Homo sapiens
SPAGQAKPD

SEQ ID NO: 145560 - protein, 9 aa, Homo sapiens
PAGQAKPDT

SEQ ID NO: 145561 - protein, 9 aa, Homo sapiens
AGQAKPDTS

SEQ ID NO: 145562 - protein, 9 aa, Homo sapiens
GQAKPDTSN

SEQ ID NO: 145563 - protein, 9 aa, Homo sapiens
QAKPDTSNY

SEQ ID NO: 145564 - protein, 9 aa, Homo sapiens
AKPDTSNYN

SEQ ID NO: 145565 - protein, 9 aa, Homo sapiens
KPDTSNYNI

SEQ ID NO: 145566 - protein, 9 aa, Homo sapiens
PDTSNYNIV

SEQ ID NO: 145567 - protein, 9 aa, Homo sapiens
DTSNYNIVT

SEQ ID NO: 145568 - protein, 9 aa, Homo sapiens
TSNYNIVTF

SEQ ID NO: 145569 - protein, 9 aa, Homo sapiens
SNYNIVTFC

SEQ ID NO: 145570 - protein, 9 aa, Homo sapiens
NYNIVTFCC

SEQ ID NO: 145571 - protein, 9 aa, Homo sapiens
YNIVTFCCQ

SEQ ID NO: 145572 - protein, 9 aa, Homo sapiens
NIVTFCCQC

SEQ ID NO: 145573 - protein, 9 aa, Homo sapiens
IVTFCCQCE

SEQ ID NO: 145574 - protein, 9 aa, Homo sapiens
VTFCCQCES

SEQ ID NO: 145575 - protein, 9 aa, Homo sapiens
TFCCQCEST

SEQ ID NO: 145576 - protein, 9 aa, Homo sapiens
FCCQCESTL

SEQ ID NO: 145577 - protein, 9 aa, Homo sapiens
CCQCESTLR

SEQ ID NO: 145578 - protein, 9 aa, Homo sapiens
CQCESTLRL

SEQ ID NO: 145579 - protein, 9 aa, Homo sapiens
QCESTLRLC

SEQ ID NO: 145580 - protein, 9 aa, Homo sapiens
CESTLRLCV

SEQ ID NO: 145581 - protein, 9 aa, Homo sapiens
ESTLRLCVQ

SEQ ID NO: 145582 - protein, 9 aa, Homo sapiens
STLRLCVQS

SEQ ID NO: 145583 - protein, 9 aa, Homo sapiens
TLRLCVQST

SEQ ID NO: 145584 - protein, 9 aa, Homo sapiens
LRLCVQSTQ

SEQ ID NO: 145585 - protein, 9 aa, Homo sapiens
RLCVQSTQV

SEQ ID NO: 145586 - protein, 9 aa, Homo sapiens
LCVQSTQVD

SEQ ID NO: 145587 - protein, 9 aa, Homo sapiens
CVQSTQVDI

SEQ ID NO: 145588 - protein, 9 aa, Homo sapiens
VQSTQVDIR

SEQ ID NO: 145589 - protein, 9 aa, Homo sapiens
QSTQVDIRI

SEQ ID NO: 145590 - protein, 9 aa, Homo sapiens
STQVDIRIL

SEQ ID NO: 145591 - protein, 9 aa, Homo sapiens
TQVDIRILQ

SEQ ID NO: 145592 - protein, 9 aa, Homo sapiens
QVDIRILQE

SEQ ID NO: 145593 - protein, 9 aa, Homo sapiens
VDIRILQEL

SEQ ID NO: 145594 - protein, 9 aa, Homo sapiens
DIRILQELL

SEQ ID NO: 145595 - protein, 9 aa, Homo sapiens
IRILQELLM

SEQ ID NO: 145596 - protein, 9 aa, Homo sapiens
RILQELLMG

SEQ ID NO: 145597 - protein, 9 aa, Homo sapiens
ILQELLMGS

SEQ ID NO: 145598 - protein, 9 aa, Homo sapiens
LQELLMGSF

SEQ ID NO: 145599 - protein, 9 aa, Homo sapiens
QELLMGSFG

SEQ ID NO: 145600 - protein, 9 aa, Homo sapiens
ELLMGSFGI

SEQ ID NO: 145601 - protein, 9 aa, Homo sapiens
LLMGSFGIV

SEQ ID NO: 145602 - protein, 9 aa, Homo sapiens
LMGSFGIVC

SEQ ID NO: 145603 - protein, 9 aa, Homo sapiens
MGSFGIVCP

SEQ ID NO: 145604 - protein, 9 aa, Homo sapiens
GSFGIVCPN

SEQ ID NO: 145605 - protein, 9 aa, Homo sapiens
SFGIVCPNC

SEQ ID NO: 145606 - protein, 9 aa, Homo sapiens
FGIVCPNCS

SEQ ID NO: 145607 - protein, 9 aa, Homo sapiens
GIVCPNCST

SEQ ID NO: 145608 - protein, 9 aa, Homo sapiens
IVCPNCSTR

SEQ ID NO: 145609 - protein, 9 aa, Homo sapiens
VCPNCSTRL

SEQ ID NO: 145610 - protein, 9 aa, Homo sapiens
MRGDKATIP

SEQ ID NO: 145611 - protein, 9 aa, Homo sapiens
RGDKATIPD

SEQ ID NO: 145612 - protein, 9 aa, Homo sapiens
GDKATIPDI

SEQ ID NO: 145613 - protein, 9 aa, Homo sapiens
DKATIPDIE

SEQ ID NO: 145614 - protein, 9 aa, Homo sapiens
KATIPDIEL

SEQ ID NO: 145615 - protein, 9 aa, Homo sapiens
ATIPDIELE

SEQ ID NO: 145616 - protein, 9 aa, Homo sapiens
TIPDIELEE

SEQ ID NO: 145617 - protein, 9 aa, Homo sapiens
IPDIELEEL

SEQ ID NO: 145618 - protein, 9 aa, Homo sapiens
PDIELEELV

SEQ ID NO: 145619 - protein, 9 aa, Homo sapiens
DIELEELVL

SEQ ID NO: 145620 - protein, 9 aa, Homo sapiens
IELEELVLP

SEQ ID NO: 145621 - protein, 9 aa, Homo sapiens
ELEELVLPA

SEQ ID NO: 145622 - protein, 9 aa, Homo sapiens
LEELVLPAN

SEQ ID NO: 145623 - protein, 9 aa, Homo sapiens
EELVLPANL

SEQ ID NO: 145624 - protein, 9 aa, Homo sapiens
ELVLPANLI

SEQ ID NO: 145625 - protein, 9 aa, Homo sapiens
LVLPANLIS

SEQ ID NO: 145626 - protein, 9 aa, Homo sapiens
VLPANLISD

SEQ ID NO: 145627 - protein, 9 aa, Homo sapiens
LPANLISDE

SEQ ID NO: 145628 - protein, 9 aa, Homo sapiens
PANLISDES

SEQ ID NO: 145629 - protein, 9 aa, Homo sapiens
ANLISDESL

SEQ ID NO: 145630 - protein, 9 aa, Homo sapiens
NLISDESLS

SEQ ID NO: 145631 - protein, 9 aa, Homo sapiens
LISDESLSP

SEQ ID NO: 145632 - protein, 9 aa, Homo sapiens
ISDESLSPD

SEQ ID NO: 145633 - protein, 9 aa, Homo sapiens
SDESLSPDA

SEQ ID NO: 145634 - protein, 9 aa, Homo sapiens
DESLSPDAT

SEQ ID NO: 145635 - protein, 9 aa, Homo sapiens
ESLSPDATA

SEQ ID NO: 145636 - protein, 9 aa, Homo sapiens
SLSPDATAE

SEQ ID NO: 145637 - protein, 9 aa, Homo sapiens
LSPDATAEE

SEQ ID NO: 145638 - protein, 9 aa, Homo sapiens
SPDATAEEE

SEQ ID NO: 145639 - protein, 9 aa, Homo sapiens
PDATAEEEF

SEQ ID NO: 145640 - protein, 9 aa, Homo sapiens
DATAEEEFC

SEQ ID NO: 145641 - protein, 9 aa, Homo sapiens
ATAEEEFCP

SEQ ID NO: 145642 - protein, 9 aa, Homo sapiens
TAEEEFCPY

SEQ ID NO: 145643 - protein, 9 aa, Homo sapiens
AEEEFCPYR

SEQ ID NO: 145644 - protein, 9 aa, Homo sapiens
EEEFCPYRI

SEQ ID NO: 145645 - protein, 9 aa, Homo sapiens
EEFCPYRID

SEQ ID NO: 145646 - protein, 9 aa, Homo sapiens
EFCPYRIDS

SEQ ID NO: 145647 - protein, 9 aa, Homo sapiens
FCPYRIDSK

SEQ ID NO: 145648 - protein, 9 aa, Homo sapiens
CPYRIDSKC

SEQ ID NO: 145649 - protein, 9 aa, Homo sapiens
PYRIDSKCH

SEQ ID NO: 145650 - protein, 9 aa, Homo sapiens
YRIDSKCHN

SEQ ID NO: 145651 - protein, 9 aa, Homo sapiens
RIDSKCHNC

SEQ ID NO: 145652 - protein, 9 aa, Homo sapiens
IDSKCHNCG

SEQ ID NO: 145653 - protein, 9 aa, Homo sapiens
DSKCHNCGC

SEQ ID NO: 145654 - protein, 9 aa, Homo sapiens
SKCHNCGCR

SEQ ID NO: 145655 - protein, 9 aa, Homo sapiens
KCHNCGCRI

SEQ ID NO: 145656 - protein, 9 aa, Homo sapiens
CHNCGCRIR

SEQ ID NO: 145657 - protein, 9 aa, Homo sapiens
HNCGCRIRV

SEQ ID NO: 145658 - protein, 9 aa, Homo sapiens
NCGCRIRVT

SEQ ID NO: 145659 - protein, 9 aa, Homo sapiens
CGCRIRVTV

SEQ ID NO: 145660 - protein, 9 aa, Homo sapiens
GCRIRVTVA

SEQ ID NO: 145661 - protein, 9 aa, Homo sapiens
CRIRVTVAA

SEQ ID NO: 145662 - protein, 9 aa, Homo sapiens
RIRVTVAAT

SEQ ID NO: 145663 - protein, 9 aa, Homo sapiens
IRVTVAATE

SEQ ID NO: 145664 - protein, 9 aa, Homo sapiens
RVTVAATEF

SEQ ID NO: 145665 - protein, 9 aa, Homo sapiens
VTVAATEFG

SEQ ID NO: 145666 - protein, 9 aa, Homo sapiens
TVAATEFGI

SEQ ID NO: 145667 - protein, 9 aa, Homo sapiens
VAATEFGIR

SEQ ID NO: 145668 - protein, 9 aa, Homo sapiens
AATEFGIRC

SEQ ID NO: 145669 - protein, 9 aa, Homo sapiens
ATEFGIRCF

SEQ ID NO: 145670 - protein, 9 aa, Homo sapiens
TEFGIRCFE

SEQ ID NO: 145671 - protein, 9 aa, Homo sapiens
EFGIRCFEQ

SEQ ID NO: 145672 - protein, 9 aa, Homo sapiens
FGIRCFEQL

SEQ ID NO: 145673 - protein, 9 aa, Homo sapiens
GIRCFEQLL

SEQ ID NO: 145674 - protein, 9 aa, Homo sapiens
IRCFEQLLL

SEQ ID NO: 145675 - protein, 9 aa, Homo sapiens
RCFEQLLLK

SEQ ID NO: 145676 - protein, 9 aa, Homo sapiens
CFEQLLLKE

SEQ ID NO: 145677 - protein, 9 aa, Homo sapiens
FEQLLLKEL

SEQ ID NO: 145678 - protein, 9 aa, Homo sapiens
EQLLLKELC

SEQ ID NO: 145679 - protein, 9 aa, Homo sapiens
QLLLKELCL

SEQ ID NO: 145680 - protein, 9 aa, Homo sapiens
LLLKELCLF

SEQ ID NO: 145681 - protein, 9 aa, Homo sapiens
LLKELCLFC

SEQ ID NO: 145682 - protein, 9 aa, Homo sapiens
LKELCLFCP

SEQ ID NO: 145683 - protein, 9 aa, Homo sapiens
KELCLFCPA

SEQ ID NO: 145684 - protein, 9 aa, Homo sapiens
ELCLFCPAC

SEQ ID NO: 145685 - protein, 9 aa, Homo sapiens
LCLFCPACS

SEQ ID NO: 145686 - protein, 9 aa, Homo sapiens
CLFCPACSR

SEQ ID NO: 145687 - protein, 9 aa, Homo sapiens
LFCPACSRQ

SEQ ID NO: 145688 - protein, 9 aa, Homo sapiens
FCPACSRQL

SEQ ID NO: 145689 - protein, 9 aa, Homo sapiens
CPACSRQLP

SEQ ID NO: 145690 - protein, 9 aa, Homo sapiens
PACSRQLPR

SEQ ID NO: 145691 - protein, 9 aa, Homo sapiens
ACSRQLPRN

SEQ ID NO: 145692 - protein, 9 aa, Homo sapiens
CSRQLPRNG

SEQ ID NO: 145693 - protein, 9 aa, Homo sapiens
SRQLPRNGR

SEQ ID NO: 145694 - protein, 9 aa, Homo sapiens
RQLPRNGRS

SEQ ID NO: 145695 - protein, 9 aa, Homo sapiens
MIGNQPNVN

SEQ ID NO: 145696 - protein, 9 aa, Homo sapiens
IGNQPNVNN

SEQ ID NO: 145697 - protein, 9 aa, Homo sapiens
GNQPNVNNL

SEQ ID NO: 145698 - protein, 9 aa, Homo sapiens
NQPNVNNLD

SEQ ID NO: 145699 - protein, 9 aa, Homo sapiens
QPNVNNLDV

SEQ ID NO: 145700 - protein, 9 aa, Homo sapiens
PNVNNLDVN

SEQ ID NO: 145701 - protein, 9 aa, Homo sapiens
NVNNLDVNL

SEQ ID NO: 145702 - protein, 9 aa, Homo sapiens
VNNLDVNLE

SEQ ID NO: 145703 - protein, 9 aa, Homo sapiens
NNLDVNLEE

SEQ ID NO: 145704 - protein, 9 aa, Homo sapiens
NLDVNLEEL

SEQ ID NO: 145705 - protein, 9 aa, Homo sapiens
LDVNLEELV

SEQ ID NO: 145706 - protein, 9 aa, Homo sapiens
DVNLEELVL

SEQ ID NO: 145707 - protein, 9 aa, Homo sapiens
VNLEELVLP

SEQ ID NO: 145708 - protein, 9 aa, Homo sapiens
NLEELVLPV

SEQ ID NO: 145709 - protein, 9 aa, Homo sapiens
LEELVLPVS

SEQ ID NO: 145710 - protein, 9 aa, Homo sapiens
EELVLPVSL

SEQ ID NO: 145711 - protein, 9 aa, Homo sapiens
ELVLPVSLL

SEQ ID NO: 145712 - protein, 9 aa, Homo sapiens
LVLPVSLLA

SEQ ID NO: 145713 - protein, 9 aa, Homo sapiens
VLPVSLLAD

SEQ ID NO: 145714 - protein, 9 aa, Homo sapiens
LPVSLLADE

SEQ ID NO: 145715 - protein, 9 aa, Homo sapiens
PVSLLADEE

SEQ ID NO: 145716 - protein, 9 aa, Homo sapiens
VSLLADEEL

SEQ ID NO: 145717 - protein, 9 aa, Homo sapiens
SLLADEELS

SEQ ID NO: 145718 - protein, 9 aa, Homo sapiens
LLADEELSP

SEQ ID NO: 145719 - protein, 9 aa, Homo sapiens
LADEELSPD

SEQ ID NO: 145720 - protein, 9 aa, Homo sapiens
ADEELSPDG

SEQ ID NO: 145721 - protein, 9 aa, Homo sapiens
DEELSPDGD

SEQ ID NO: 145722 - protein, 9 aa, Homo sapiens
EELSPDGDP

SEQ ID NO: 145723 - protein, 9 aa, Homo sapiens
ELSPDGDPE

SEQ ID NO: 145724 - protein, 9 aa, Homo sapiens
LSPDGDPEE

SEQ ID NO: 145725 - protein, 9 aa, Homo sapiens
SPDGDPEEE

SEQ ID NO: 145726 - protein, 9 aa, Homo sapiens
PDGDPEEEE

SEQ ID NO: 145727 - protein, 9 aa, Homo sapiens
DGDPEEEEH

SEQ ID NO: 145728 - protein, 9 aa, Homo sapiens
GDPEEEEHY

SEQ ID NO: 145729 - protein, 9 aa, Homo sapiens
DPEEEEHYP

SEQ ID NO: 145730 - protein, 9 aa, Homo sapiens
PEEEEHYPY

SEQ ID NO: 145731 - protein, 9 aa, Homo sapiens
EEEEHYPYT

SEQ ID NO: 145732 - protein, 9 aa, Homo sapiens
EEEHYPYTI

SEQ ID NO: 145733 - protein, 9 aa, Homo sapiens
EEHYPYTID

SEQ ID NO: 145734 - protein, 9 aa, Homo sapiens
EHYPYTIDT

SEQ ID NO: 145735 - protein, 9 aa, Homo sapiens
HYPYTIDTC

SEQ ID NO: 145736 - protein, 9 aa, Homo sapiens
YPYTIDTCC

SEQ ID NO: 145737 - protein, 9 aa, Homo sapiens
PYTIDTCCK

SEQ ID NO: 145738 - protein, 9 aa, Homo sapiens
YTIDTCCKP

SEQ ID NO: 145739 - protein, 9 aa, Homo sapiens
TIDTCCKPC

SEQ ID NO: 145740 - protein, 9 aa, Homo sapiens
IDTCCKPCG

SEQ ID NO: 145741 - protein, 9 aa, Homo sapiens
DTCCKPCGA

SEQ ID NO: 145742 - protein, 9 aa, Homo sapiens
TCCKPCGAG

SEQ ID NO: 145743 - protein, 9 aa, Homo sapiens
CCKPCGAGV

SEQ ID NO: 145744 - protein, 9 aa, Homo sapiens
CKPCGAGVR

SEQ ID NO: 145745 - protein, 9 aa, Homo sapiens
KPCGAGVRF

SEQ ID NO: 145746 - protein, 9 aa, Homo sapiens
PCGAGVRFT

SEQ ID NO: 145747 - protein, 9 aa, Homo sapiens
CGAGVRFTI

SEQ ID NO: 145748 - protein, 9 aa, Homo sapiens
GAGVRFTII

SEQ ID NO: 145749 - protein, 9 aa, Homo sapiens
AGVRFTIIA

SEQ ID NO: 145750 - protein, 9 aa, Homo sapiens
GVRFTIIAT

SEQ ID NO: 145751 - protein, 9 aa, Homo sapiens
VRFTIIATP

SEQ ID NO: 145752 - protein, 9 aa, Homo sapiens
RFTIIATPS

SEQ ID NO: 145753 - protein, 9 aa, Homo sapiens
FTIIATPSA

SEQ ID NO: 145754 - protein, 9 aa, Homo sapiens
TIIATPSAV

SEQ ID NO: 145755 - protein, 9 aa, Homo sapiens
IIATPSAVI

SEQ ID NO: 145756 - protein, 9 aa, Homo sapiens
IATPSAVIT

SEQ ID NO: 145757 - protein, 9 aa, Homo sapiens
ATPSAVITL

SEQ ID NO: 145758 - protein, 9 aa, Homo sapiens
TPSAVITLR

SEQ ID NO: 145759 - protein, 9 aa, Homo sapiens
PSAVITLRQ

SEQ ID NO: 145760 - protein, 9 aa, Homo sapiens
SAVITLRQL

SEQ ID NO: 145761 - protein, 9 aa, Homo sapiens
AVITLRQLL

SEQ ID NO: 145762 - protein, 9 aa, Homo sapiens
VITLRQLLL

SEQ ID NO: 145763 - protein, 9 aa, Homo sapiens
ITLRQLLLQ

SEQ ID NO: 145764 - protein, 9 aa, Homo sapiens
TLRQLLLQE

SEQ ID NO: 145765 - protein, 9 aa, Homo sapiens
LRQLLLQEV

SEQ ID NO: 145766 - protein, 9 aa, Homo sapiens
RQLLLQEVF

SEQ ID NO: 145767 - protein, 9 aa, Homo sapiens
QLLLQEVFL

SEQ ID NO: 145768 - protein, 9 aa, Homo sapiens
LLLQEVFLT

SEQ ID NO: 145769 - protein, 9 aa, Homo sapiens
LLQEVFLTC

SEQ ID NO: 145770 - protein, 9 aa, Homo sapiens
LQEVFLTCL

SEQ ID NO: 145771 - protein, 9 aa, Homo sapiens
QEVFLTCLR

SEQ ID NO: 145772 - protein, 9 aa, Homo sapiens
EVFLTCLRC

SEQ ID NO: 145773 - protein, 9 aa, Homo sapiens
VFLTCLRCS

SEQ ID NO: 145774 - protein, 9 aa, Homo sapiens
FLTCLRCSR

SEQ ID NO: 145775 - protein, 9 aa, Homo sapiens
LTCLRCSRS

SEQ ID NO: 145776 - protein, 9 aa, Homo sapiens
TCLRCSRSL

SEQ ID NO: 145777 - protein, 9 aa, Homo sapiens
CLRCSRSLF

SEQ ID NO: 145778 - protein, 9 aa, Homo sapiens
LRCSRSLFR

SEQ ID NO: 145779 - protein, 9 aa, Homo sapiens
RCSRSLFRH

SEQ ID NO: 145780 - protein, 9 aa, Homo sapiens
CSRSLFRHG

SEQ ID NO: 145781 - protein, 9 aa, Homo sapiens
SRSLFRHGR

SEQ ID NO: 145782 - protein, 9 aa, Homo sapiens
RSLFRHGRS

SEQ ID NO: 145783 - protein, 9 aa, Homo sapiens
MHGDTINIQ

SEQ ID NO: 145784 - protein, 9 aa, Homo sapiens
HGDTINIQD

SEQ ID NO: 145785 - protein, 9 aa, Homo sapiens
GDTINIQDV

SEQ ID NO: 145786 - protein, 9 aa, Homo sapiens
DTINIQDVI

SEQ ID NO: 145787 - protein, 9 aa, Homo sapiens
TINIQDVIL

SEQ ID NO: 145788 - protein, 9 aa, Homo sapiens
INIQDVILD

SEQ ID NO: 145789 - protein, 9 aa, Homo sapiens
NIQDVILDL

SEQ ID NO: 145790 - protein, 9 aa, Homo sapiens
IQDVILDLV

SEQ ID NO: 145791 - protein, 9 aa, Homo sapiens
QDVILDLVP

SEQ ID NO: 145792 - protein, 9 aa, Homo sapiens
DVILDLVPQ

SEQ ID NO: 145793 - protein, 9 aa, Homo sapiens
VILDLVPQP

SEQ ID NO: 145794 - protein, 9 aa, Homo sapiens
ILDLVPQPE

SEQ ID NO: 145795 - protein, 9 aa, Homo sapiens
LDLVPQPEI

SEQ ID NO: 145796 - protein, 9 aa, Homo sapiens
DLVPQPEID

SEQ ID NO: 145797 - protein, 9 aa, Homo sapiens
LVPQPEIDL

SEQ ID NO: 145798 - protein, 9 aa, Homo sapiens
VPQPEIDLQ

SEQ ID NO: 145799 - protein, 9 aa, Homo sapiens
PQPEIDLQC

SEQ ID NO: 145800 - protein, 9 aa, Homo sapiens
QPEIDLQCY

SEQ ID NO: 145801 - protein, 9 aa, Homo sapiens
PEIDLQCYE

SEQ ID NO: 145802 - protein, 9 aa, Homo sapiens
EIDLQCYEQ

SEQ ID NO: 145803 - protein, 9 aa, Homo sapiens
IDLQCYEQL

SEQ ID NO: 145804 - protein, 9 aa, Homo sapiens
DLQCYEQLD

SEQ ID NO: 145805 - protein, 9 aa, Homo sapiens
LQCYEQLDY

SEQ ID NO: 145806 - protein, 9 aa, Homo sapiens
QCYEQLDYE

SEQ ID NO: 145807 - protein, 9 aa, Homo sapiens
CYEQLDYEQ

SEQ ID NO: 145808 - protein, 9 aa, Homo sapiens
YEQLDYEQF

SEQ ID NO: 145809 - protein, 9 aa, Homo sapiens
EQLDYEQFD

SEQ ID NO: 145810 - protein, 9 aa, Homo sapiens
QLDYEQFDS

SEQ ID NO: 145811 - protein, 9 aa, Homo sapiens
LDYEQFDSS

SEQ ID NO: 145812 - protein, 9 aa, Homo sapiens
DYEQFDSSE

SEQ ID NO: 145813 - protein, 9 aa, Homo sapiens
YEQFDSSEE

SEQ ID NO: 145814 - protein, 9 aa, Homo sapiens
EQFDSSEED

SEQ ID NO: 145815 - protein, 9 aa, Homo sapiens
QFDSSEEDE

SEQ ID NO: 145816 - protein, 9 aa, Homo sapiens
FDSSEEDET

SEQ ID NO: 145817 - protein, 9 aa, Homo sapiens
DSSEEDETD

SEQ ID NO: 145818 - protein, 9 aa, Homo sapiens
SSEEDETDN

SEQ ID NO: 145819 - protein, 9 aa, Homo sapiens
SEEDETDNV

SEQ ID NO: 145820 - protein, 9 aa, Homo sapiens
EEDETDNVR

SEQ ID NO: 145821 - protein, 9 aa, Homo sapiens
EDETDNVRN

SEQ ID NO: 145822 - protein, 9 aa, Homo sapiens
DETDNVRNQ

SEQ ID NO: 145823 - protein, 9 aa, Homo sapiens
ETDNVRNQQ

SEQ ID NO: 145824 - protein, 9 aa, Homo sapiens
TDNVRNQQA

SEQ ID NO: 145825 - protein, 9 aa, Homo sapiens
DNVRNQQAR

SEQ ID NO: 145826 - protein, 9 aa, Homo sapiens
NVRNQQARQ

SEQ ID NO: 145827 - protein, 9 aa, Homo sapiens
VRNQQARQA

SEQ ID NO: 145828 - protein, 9 aa, Homo sapiens
RNQQARQAE

SEQ ID NO: 145829 - protein, 9 aa, Homo sapiens
NQQARQAEQ

SEQ ID NO: 145830 - protein, 9 aa, Homo sapiens
QQARQAEQE

SEQ ID NO: 145831 - protein, 9 aa, Homo sapiens
QARQAEQEA

SEQ ID NO: 145832 - protein, 9 aa, Homo sapiens
ARQAEQEAC

SEQ ID NO: 145833 - protein, 9 aa, Homo sapiens
RQAEQEACY

SEQ ID NO: 145834 - protein, 9 aa, Homo sapiens
QAEQEACYR

SEQ ID NO: 145835 - protein, 9 aa, Homo sapiens
AEQEACYRI

SEQ ID NO: 145836 - protein, 9 aa, Homo sapiens
EQEACYRIE

SEQ ID NO: 145837 - protein, 9 aa, Homo sapiens
QEACYRIEA

SEQ ID NO: 145838 - protein, 9 aa, Homo sapiens
EACYRIEAE

SEQ ID NO: 145839 - protein, 9 aa, Homo sapiens
ACYRIEAEC

SEQ ID NO: 145840 - protein, 9 aa, Homo sapiens
CYRIEAECC

SEQ ID NO: 145841 - protein, 9 aa, Homo sapiens
YRIEAECCV

SEQ ID NO: 145842 - protein, 9 aa, Homo sapiens
RIEAECCVC

SEQ ID NO: 145843 - protein, 9 aa, Homo sapiens
IEAECCVCN

SEQ ID NO: 145844 - protein, 9 aa, Homo sapiens
EAECCVCNS

SEQ ID NO: 145845 - protein, 9 aa, Homo sapiens
AECCVCNSI

SEQ ID NO: 145846 - protein, 9 aa, Homo sapiens
ECCVCNSIV

SEQ ID NO: 145847 - protein, 9 aa, Homo sapiens
CCVCNSIVQ

SEQ ID NO: 145848 - protein, 9 aa, Homo sapiens
CVCNSIVQL

SEQ ID NO: 145849 - protein, 9 aa, Homo sapiens
VCNSIVQLA

SEQ ID NO: 145850 - protein, 9 aa, Homo sapiens
CNSIVQLAV

SEQ ID NO: 145851 - protein, 9 aa, Homo sapiens
NSIVQLAVL

SEQ ID NO: 145852 - protein, 9 aa, Homo sapiens
SIVQLAVLS

SEQ ID NO: 145853 - protein, 9 aa, Homo sapiens
IVQLAVLSS

SEQ ID NO: 145854 - protein, 9 aa, Homo sapiens
VQLAVLSSR

SEQ ID NO: 145855 - protein, 9 aa, Homo sapiens
QLAVLSSRQ

SEQ ID NO: 145856 - protein, 9 aa, Homo sapiens
LAVLSSRQN

SEQ ID NO: 145857 - protein, 9 aa, Homo sapiens
AVLSSRQNV

SEQ ID NO: 145858 - protein, 9 aa, Homo sapiens
VLSSRQNVR

SEQ ID NO: 145859 - protein, 9 aa, Homo sapiens
LSSRQNVRA

SEQ ID NO: 145860 - protein, 9 aa, Homo sapiens
SSRQNVRAV

SEQ ID NO: 145861 - protein, 9 aa, Homo sapiens
SRQNVRAVE

SEQ ID NO: 145862 - protein, 9 aa, Homo sapiens
RQNVRAVEQ

SEQ ID NO: 145863 - protein, 9 aa, Homo sapiens
QNVRAVEQL

SEQ ID NO: 145864 - protein, 9 aa, Homo sapiens
NVRAVEQLL

SEQ ID NO: 145865 - protein, 9 aa, Homo sapiens
VRAVEQLLM

SEQ ID NO: 145866 - protein, 9 aa, Homo sapiens
RAVEQLLMG

SEQ ID NO: 145867 - protein, 9 aa, Homo sapiens
AVEQLLMGD

SEQ ID NO: 145868 - protein, 9 aa, Homo sapiens
VEQLLMGDV

SEQ ID NO: 145869 - protein, 9 aa, Homo sapiens
EQLLMGDVS

SEQ ID NO: 145870 - protein, 9 aa, Homo sapiens
QLLMGDVSL

SEQ ID NO: 145871 - protein, 9 aa, Homo sapiens
LLMGDVSLV

SEQ ID NO: 145872 - protein, 9 aa, Homo sapiens
LMGDVSLVC

SEQ ID NO: 145873 - protein, 9 aa, Homo sapiens
MGDVSLVCH

SEQ ID NO: 145874 - protein, 9 aa, Homo sapiens
GDVSLVCHQ

SEQ ID NO: 145875 - protein, 9 aa, Homo sapiens
DVSLVCHQC

SEQ ID NO: 145876 - protein, 9 aa, Homo sapiens
VSLVCHQCA

SEQ ID NO: 145877 - protein, 9 aa, Homo sapiens
SLVCHQCAT

SEQ ID NO: 145878 - protein, 9 aa, Homo sapiens
MHGQVATIK

SEQ ID NO: 145879 - protein, 9 aa, Homo sapiens
HGQVATIKD

SEQ ID NO: 145880 - protein, 9 aa, Homo sapiens
GQVATIKDI

SEQ ID NO: 145881 - protein, 9 aa, Homo sapiens
QVATIKDIV

SEQ ID NO: 145882 - protein, 9 aa, Homo sapiens
VATIKDIVL

SEQ ID NO: 145883 - protein, 9 aa, Homo sapiens
ATIKDIVLQ

SEQ ID NO: 145884 - protein, 9 aa, Homo sapiens
TIKDIVLQE

SEQ ID NO: 145885 - protein, 9 aa, Homo sapiens
IKDIVLQEL

SEQ ID NO: 145886 - protein, 9 aa, Homo sapiens
KDIVLQELP

SEQ ID NO: 145887 - protein, 9 aa, Homo sapiens
DIVLQELPD

SEQ ID NO: 145888 - protein, 9 aa, Homo sapiens
IVLQELPDV

SEQ ID NO: 145889 - protein, 9 aa, Homo sapiens
VLQELPDVV

SEQ ID NO: 145890 - protein, 9 aa, Homo sapiens
LQELPDVVD

SEQ ID NO: 145891 - protein, 9 aa, Homo sapiens
QELPDVVDL

SEQ ID NO: 145892 - protein, 9 aa, Homo sapiens
ELPDVVDLH

SEQ ID NO: 145893 - protein, 9 aa, Homo sapiens
LPDVVDLHC

SEQ ID NO: 145894 - protein, 9 aa, Homo sapiens
PDVVDLHCN

SEQ ID NO: 145895 - protein, 9 aa, Homo sapiens
DVVDLHCNE

SEQ ID NO: 145896 - protein, 9 aa, Homo sapiens
VVDLHCNEQ

SEQ ID NO: 145897 - protein, 9 aa, Homo sapiens
VDLHCNEQL

SEQ ID NO: 145898 - protein, 9 aa, Homo sapiens
DLHCNEQLL

SEQ ID NO: 145899 - protein, 9 aa, Homo sapiens
LHCNEQLLD

SEQ ID NO: 145900 - protein, 9 aa, Homo sapiens
HCNEQLLDS

SEQ ID NO: 145901 - protein, 9 aa, Homo sapiens
CNEQLLDSS

SEQ ID NO: 145902 - protein, 9 aa, Homo sapiens
NEQLLDSSE

SEQ ID NO: 145903 - protein, 9 aa, Homo sapiens
EQLLDSSES

SEQ ID NO: 145904 - protein, 9 aa, Homo sapiens
QLLDSSESE

SEQ ID NO: 145905 - protein, 9 aa, Homo sapiens
LLDSSESES

SEQ ID NO: 145906 - protein, 9 aa, Homo sapiens
LDSSESESE

SEQ ID NO: 145907 - protein, 9 aa, Homo sapiens
DSSESESED

SEQ ID NO: 145908 - protein, 9 aa, Homo sapiens
SSESESEDE

SEQ ID NO: 145909 - protein, 9 aa, Homo sapiens
SESESEDER

SEQ ID NO: 145910 - protein, 9 aa, Homo sapiens
ESESEDERD

SEQ ID NO: 145911 - protein, 9 aa, Homo sapiens
SESEDERDG

SEQ ID NO: 145912 - protein, 9 aa, Homo sapiens
ESEDERDGV

SEQ ID NO: 145913 - protein, 9 aa, Homo sapiens
SEDERDGVG

SEQ ID NO: 145914 - protein, 9 aa, Homo sapiens
EDERDGVGV

SEQ ID NO: 145915 - protein, 9 aa, Homo sapiens
DERDGVGVQ

SEQ ID NO: 145916 - protein, 9 aa, Homo sapiens
ERDGVGVQE

SEQ ID NO: 145917 - protein, 9 aa, Homo sapiens
RDGVGVQEQ

SEQ ID NO: 145918 - protein, 9 aa, Homo sapiens
DGVGVQEQL

SEQ ID NO: 145919 - protein, 9 aa, Homo sapiens
GVGVQEQLV

SEQ ID NO: 145920 - protein, 9 aa, Homo sapiens
VGVQEQLVE

SEQ ID NO: 145921 - protein, 9 aa, Homo sapiens
GVQEQLVEQ

SEQ ID NO: 145922 - protein, 9 aa, Homo sapiens
VQEQLVEQA

SEQ ID NO: 145923 - protein, 9 aa, Homo sapiens
QEQLVEQAQ

SEQ ID NO: 145924 - protein, 9 aa, Homo sapiens
EQLVEQAQQ

SEQ ID NO: 145925 - protein, 9 aa, Homo sapiens
QLVEQAQQA

SEQ ID NO: 145926 - protein, 9 aa, Homo sapiens
LVEQAQQAY

SEQ ID NO: 145927 - protein, 9 aa, Homo sapiens
VEQAQQAYG

SEQ ID NO: 145928 - protein, 9 aa, Homo sapiens
EQAQQAYGV

SEQ ID NO: 145929 - protein, 9 aa, Homo sapiens
QAQQAYGVV

SEQ ID NO: 145930 - protein, 9 aa, Homo sapiens
AQQAYGVVT

SEQ ID NO: 145931 - protein, 9 aa, Homo sapiens
QQAYGVVTT

SEQ ID NO: 145932 - protein, 9 aa, Homo sapiens
QAYGVVTTC

SEQ ID NO: 145933 - protein, 9 aa, Homo sapiens
AYGVVTTCG

SEQ ID NO: 145934 - protein, 9 aa, Homo sapiens
YGVVTTCGR

SEQ ID NO: 145935 - protein, 9 aa, Homo sapiens
GVVTTCGRC

SEQ ID NO: 145936 - protein, 9 aa, Homo sapiens
VVTTCGRCY

SEQ ID NO: 145937 - protein, 9 aa, Homo sapiens
VTTCGRCYR

SEQ ID NO: 145938 - protein, 9 aa, Homo sapiens
TTCGRCYRP

SEQ ID NO: 145939 - protein, 9 aa, Homo sapiens
TCGRCYRPV

SEQ ID NO: 145940 - protein, 9 aa, Homo sapiens
CGRCYRPVR

SEQ ID NO: 145941 - protein, 9 aa, Homo sapiens
GRCYRPVRL

SEQ ID NO: 145942 - protein, 9 aa, Homo sapiens
RCYRPVRLV

SEQ ID NO: 145943 - protein, 9 aa, Homo sapiens
CYRPVRLVV

SEQ ID NO: 145944 - protein, 9 aa, Homo sapiens
YRPVRLVVE

SEQ ID NO: 145945 - protein, 9 aa, Homo sapiens
RPVRLVVEC

SEQ ID NO: 145946 - protein, 9 aa, Homo sapiens
PVRLVVECR

SEQ ID NO: 145947 - protein, 9 aa, Homo sapiens
VRLVVECRD

SEQ ID NO: 145948 - protein, 9 aa, Homo sapiens
RLVVECRDA

SEQ ID NO: 145949 - protein, 9 aa, Homo sapiens
LVVECRDAD

SEQ ID NO: 145950 - protein, 9 aa, Homo sapiens
VVECRDADV

SEQ ID NO: 145951 - protein, 9 aa, Homo sapiens
VECRDADVK

SEQ ID NO: 145952 - protein, 9 aa, Homo sapiens
ECRDADVKA

SEQ ID NO: 145953 - protein, 9 aa, Homo sapiens
CRDADVKAL

SEQ ID NO: 145954 - protein, 9 aa, Homo sapiens
RDADVKALQ

SEQ ID NO: 145955 - protein, 9 aa, Homo sapiens
DADVKALQQ

SEQ ID NO: 145956 - protein, 9 aa, Homo sapiens
ADVKALQQL

SEQ ID NO: 145957 - protein, 9 aa, Homo sapiens
DVKALQQLL

SEQ ID NO: 145958 - protein, 9 aa, Homo sapiens
VKALQQLLL

SEQ ID NO: 145959 - protein, 9 aa, Homo sapiens
KALQQLLLD

SEQ ID NO: 145960 - protein, 9 aa, Homo sapiens
ALQQLLLDN

SEQ ID NO: 145961 - protein, 9 aa, Homo sapiens
LQQLLLDNL

SEQ ID NO: 145962 - protein, 9 aa, Homo sapiens
QQLLLDNLS

SEQ ID NO: 145963 - protein, 9 aa, Homo sapiens
QLLLDNLSI

SEQ ID NO: 145964 - protein, 9 aa, Homo sapiens
LLLDNLSIV

SEQ ID NO: 145965 - protein, 9 aa, Homo sapiens
LLDNLSIVC

SEQ ID NO: 145966 - protein, 9 aa, Homo sapiens
LDNLSIVCP

SEQ ID NO: 145967 - protein, 9 aa, Homo sapiens
DNLSIVCPR

SEQ ID NO: 145968 - protein, 9 aa, Homo sapiens
NLSIVCPRC

SEQ ID NO: 145969 - protein, 9 aa, Homo sapiens
LSIVCPRCA

SEQ ID NO: 145970 - protein, 9 aa, Homo sapiens
MHGKKTTLQ

SEQ ID NO: 145971 - protein, 9 aa, Homo sapiens
HGKKTTLQD

SEQ ID NO: 145972 - protein, 9 aa, Homo sapiens
GKKTTLQDI

SEQ ID NO: 145973 - protein, 9 aa, Homo sapiens
KKTTLQDIT

SEQ ID NO: 145974 - protein, 9 aa, Homo sapiens
KTTLQDITL

SEQ ID NO: 145975 - protein, 9 aa, Homo sapiens
TTLQDITLD

SEQ ID NO: 145976 - protein, 9 aa, Homo sapiens
TLQDITLDL

SEQ ID NO: 145977 - protein, 9 aa, Homo sapiens
LQDITLDLK

SEQ ID NO: 145978 - protein, 9 aa, Homo sapiens
QDITLDLKP

SEQ ID NO: 145979 - protein, 9 aa, Homo sapiens
DITLDLKPT

SEQ ID NO: 145980 - protein, 9 aa, Homo sapiens
ITLDLKPTT

SEQ ID NO: 145981 - protein, 9 aa, Homo sapiens
TLDLKPTTE

SEQ ID NO: 145982 - protein, 9 aa, Homo sapiens
LDLKPTTEI

SEQ ID NO: 145983 - protein, 9 aa, Homo sapiens
DLKPTTEID

SEQ ID NO: 145984 - protein, 9 aa, Homo sapiens
LKPTTEIDL

SEQ ID NO: 145985 - protein, 9 aa, Homo sapiens
KPTTEIDLT

SEQ ID NO: 145986 - protein, 9 aa, Homo sapiens
PTTEIDLTC

SEQ ID NO: 145987 - protein, 9 aa, Homo sapiens
TTEIDLTCY

SEQ ID NO: 145988 - protein, 9 aa, Homo sapiens
TEIDLTCYE

SEQ ID NO: 145989 - protein, 9 aa, Homo sapiens
EIDLTCYES

SEQ ID NO: 145990 - protein, 9 aa, Homo sapiens
IDLTCYESL

SEQ ID NO: 145991 - protein, 9 aa, Homo sapiens
DLTCYESLD

SEQ ID NO: 145992 - protein, 9 aa, Homo sapiens
LTCYESLDN

SEQ ID NO: 145993 - protein, 9 aa, Homo sapiens
TCYESLDNS

SEQ ID NO: 145994 - protein, 9 aa, Homo sapiens
CYESLDNSE

SEQ ID NO: 145995 - protein, 9 aa, Homo sapiens
YESLDNSED

SEQ ID NO: 145996 - protein, 9 aa, Homo sapiens
ESLDNSEDE

SEQ ID NO: 145997 - protein, 9 aa, Homo sapiens
SLDNSEDED

SEQ ID NO: 145998 - protein, 9 aa, Homo sapiens
LDNSEDEDE

SEQ ID NO: 145999 - protein, 9 aa, Homo sapiens
DNSEDEDET

SEQ ID NO: 146000 - protein, 9 aa, Homo sapiens
NSEDEDETD

SEQ ID NO: 146001 - protein, 9 aa, Homo sapiens
SEDEDETDS

SEQ ID NO: 146002 - protein, 9 aa, Homo sapiens
EDEDETDSH

SEQ ID NO: 146003 - protein, 9 aa, Homo sapiens
DEDETDSHL

SEQ ID NO: 146004 - protein, 9 aa, Homo sapiens
EDETDSHLD

SEQ ID NO: 146005 - protein, 9 aa, Homo sapiens
DETDSHLDR

SEQ ID NO: 146006 - protein, 9 aa, Homo sapiens
ETDSHLDRQ

SEQ ID NO: 146007 - protein, 9 aa, Homo sapiens
TDSHLDRQA

SEQ ID NO: 146008 - protein, 9 aa, Homo sapiens
DSHLDRQAE

SEQ ID NO: 146009 - protein, 9 aa, Homo sapiens
SHLDRQAER

SEQ ID NO: 146010 - protein, 9 aa, Homo sapiens
HLDRQAERE

SEQ ID NO: 146011 - protein, 9 aa, Homo sapiens
LDRQAEREC

SEQ ID NO: 146012 - protein, 9 aa, Homo sapiens
DRQAERECY

SEQ ID NO: 146013 - protein, 9 aa, Homo sapiens
RQAERECYR

SEQ ID NO: 146014 - protein, 9 aa, Homo sapiens
QAERECYRI

SEQ ID NO: 146015 - protein, 9 aa, Homo sapiens
AERECYRIV

SEQ ID NO: 146016 - protein, 9 aa, Homo sapiens
ERECYRIVT

SEQ ID NO: 146017 - protein, 9 aa, Homo sapiens
RECYRIVTD

SEQ ID NO: 146018 - protein, 9 aa, Homo sapiens
ECYRIVTDC

SEQ ID NO: 146019 - protein, 9 aa, Homo sapiens
CYRIVTDCT

SEQ ID NO: 146020 - protein, 9 aa, Homo sapiens
YRIVTDCTK

SEQ ID NO: 146021 - protein, 9 aa, Homo sapiens
RIVTDCTKC

SEQ ID NO: 146022 - protein, 9 aa, Homo sapiens
IVTDCTKCQ

SEQ ID NO: 146023 - protein, 9 aa, Homo sapiens
VTDCTKCQC

SEQ ID NO: 146024 - protein, 9 aa, Homo sapiens
TDCTKCQCT

SEQ ID NO: 146025 - protein, 9 aa, Homo sapiens
DCTKCQCTV

SEQ ID NO: 146026 - protein, 9 aa, Homo sapiens
CTKCQCTVC

SEQ ID NO: 146027 - protein, 9 aa, Homo sapiens
TKCQCTVCL

SEQ ID NO: 146028 - protein, 9 aa, Homo sapiens
KCQCTVCLA

SEQ ID NO: 146029 - protein, 9 aa, Homo sapiens
CQCTVCLAI

SEQ ID NO: 146030 - protein, 9 aa, Homo sapiens
QCTVCLAIE

SEQ ID NO: 146031 - protein, 9 aa, Homo sapiens
CTVCLAIES

SEQ ID NO: 146032 - protein, 9 aa, Homo sapiens
TVCLAIESN

SEQ ID NO: 146033 - protein, 9 aa, Homo sapiens
VCLAIESNK

SEQ ID NO: 146034 - protein, 9 aa, Homo sapiens
CLAIESNKA

SEQ ID NO: 146035 - protein, 9 aa, Homo sapiens
LAIESNKAD

SEQ ID NO: 146036 - protein, 9 aa, Homo sapiens
AIESNKADL

SEQ ID NO: 146037 - protein, 9 aa, Homo sapiens
IESNKADLR

SEQ ID NO: 146038 - protein, 9 aa, Homo sapiens
ESNKADLRV

SEQ ID NO: 146039 - protein, 9 aa, Homo sapiens
SNKADLRVI

SEQ ID NO: 146040 - protein, 9 aa, Homo sapiens
NKADLRVIE

SEQ ID NO: 146041 - protein, 9 aa, Homo sapiens
KADLRVIEE

SEQ ID NO: 146042 - protein, 9 aa, Homo sapiens
ADLRVIEEL

SEQ ID NO: 146043 - protein, 9 aa, Homo sapiens
DLRVIEELL

SEQ ID NO: 146044 - protein, 9 aa, Homo sapiens
LRVIEELLM

SEQ ID NO: 146045 - protein, 9 aa, Homo sapiens
RVIEELLMG

SEQ ID NO: 146046 - protein, 9 aa, Homo sapiens
VIEELLMGT

SEQ ID NO: 146047 - protein, 9 aa, Homo sapiens
IEELLMGTL

SEQ ID NO: 146048 - protein, 9 aa, Homo sapiens
EELLMGTLG

SEQ ID NO: 146049 - protein, 9 aa, Homo sapiens
ELLMGTLGI

SEQ ID NO: 146050 - protein, 9 aa, Homo sapiens
LLMGTLGIV

SEQ ID NO: 146051 - protein, 9 aa, Homo sapiens
LMGTLGIVC

SEQ ID NO: 146052 - protein, 9 aa, Homo sapiens
MGTLGIVCP

SEQ ID NO: 146053 - protein, 9 aa, Homo sapiens
GTLGIVCPN

SEQ ID NO: 146054 - protein, 9 aa, Homo sapiens
TLGIVCPNC

SEQ ID NO: 146055 - protein, 9 aa, Homo sapiens
LGIVCPNCS

SEQ ID NO: 146056 - protein, 9 aa, Homo sapiens
GIVCPNCSR

SEQ ID NO: 146057 - protein, 9 aa, Homo sapiens
IVCPNCSRN

SEQ ID NO: 146058 - protein, 9 aa, Homo sapiens
VCPNCSRNL

SEQ ID NO: 146059 - protein, 9 aa, Homo sapiens
MIGKEATLP

SEQ ID NO: 146060 - protein, 9 aa, Homo sapiens
IGKEATLPD

SEQ ID NO: 146061 - protein, 9 aa, Homo sapiens
GKEATLPDI

SEQ ID NO: 146062 - protein, 9 aa, Homo sapiens
KEATLPDIV

SEQ ID NO: 146063 - protein, 9 aa, Homo sapiens
EATLPDIVL

SEQ ID NO: 146064 - protein, 9 aa, Homo sapiens
ATLPDIVLQ

SEQ ID NO: 146065 - protein, 9 aa, Homo sapiens
TLPDIVLQE

SEQ ID NO: 146066 - protein, 9 aa, Homo sapiens
LPDIVLQEE

SEQ ID NO: 146067 - protein, 9 aa, Homo sapiens
PDIVLQEEF

SEQ ID NO: 146068 - protein, 9 aa, Homo sapiens
DIVLQEEFG

SEQ ID NO: 146069 - protein, 9 aa, Homo sapiens
IVLQEEFGQ

SEQ ID NO: 146070 - protein, 9 aa, Homo sapiens
VLQEEFGQP

SEQ ID NO: 146071 - protein, 9 aa, Homo sapiens
LQEEFGQPI

SEQ ID NO: 146072 - protein, 9 aa, Homo sapiens
QEEFGQPID

SEQ ID NO: 146073 - protein, 9 aa, Homo sapiens
EEFGQPIDL

SEQ ID NO: 146074 - protein, 9 aa, Homo sapiens
EFGQPIDLQ

SEQ ID NO: 146075 - protein, 9 aa, Homo sapiens
FGQPIDLQC

SEQ ID NO: 146076 - protein, 9 aa, Homo sapiens
GQPIDLQCY

SEQ ID NO: 146077 - protein, 9 aa, Homo sapiens
QPIDLQCYE

SEQ ID NO: 146078 - protein, 9 aa, Homo sapiens
PIDLQCYEN

SEQ ID NO: 146079 - protein, 9 aa, Homo sapiens
IDLQCYENL

SEQ ID NO: 146080 - protein, 9 aa, Homo sapiens
DLQCYENLP

SEQ ID NO: 146081 - protein, 9 aa, Homo sapiens
LQCYENLPA

SEQ ID NO: 146082 - protein, 9 aa, Homo sapiens
QCYENLPAE

SEQ ID NO: 146083 - protein, 9 aa, Homo sapiens
CYENLPAEV

SEQ ID NO: 146084 - protein, 9 aa, Homo sapiens
YENLPAEVP

SEQ ID NO: 146085 - protein, 9 aa, Homo sapiens
ENLPAEVPA

SEQ ID NO: 146086 - protein, 9 aa, Homo sapiens
NLPAEVPAE

SEQ ID NO: 146087 - protein, 9 aa, Homo sapiens
LPAEVPAEQ

SEQ ID NO: 146088 - protein, 9 aa, Homo sapiens
PAEVPAEQD

SEQ ID NO: 146089 - protein, 9 aa, Homo sapiens
AEVPAEQDT

SEQ ID NO: 146090 - protein, 9 aa, Homo sapiens
EVPAEQDTE

SEQ ID NO: 146091 - protein, 9 aa, Homo sapiens
VPAEQDTEE

SEQ ID NO: 146092 - protein, 9 aa, Homo sapiens
PAEQDTEEE

SEQ ID NO: 146093 - protein, 9 aa, Homo sapiens
AEQDTEEEL

SEQ ID NO: 146094 - protein, 9 aa, Homo sapiens
EQDTEEELI

SEQ ID NO: 146095 - protein, 9 aa, Homo sapiens
QDTEEELIQ

SEQ ID NO: 146096 - protein, 9 aa, Homo sapiens
DTEEELIQG

SEQ ID NO: 146097 - protein, 9 aa, Homo sapiens
TEEELIQGI

SEQ ID NO: 146098 - protein, 9 aa, Homo sapiens
EEELIQGIP

SEQ ID NO: 146099 - protein, 9 aa, Homo sapiens
EELIQGIPY

SEQ ID NO: 146100 - protein, 9 aa, Homo sapiens
ELIQGIPYK

SEQ ID NO: 146101 - protein, 9 aa, Homo sapiens
LIQGIPYKV

SEQ ID NO: 146102 - protein, 9 aa, Homo sapiens
IQGIPYKVI

SEQ ID NO: 146103 - protein, 9 aa, Homo sapiens
QGIPYKVIA

SEQ ID NO: 146104 - protein, 9 aa, Homo sapiens
GIPYKVIAC

SEQ ID NO: 146105 - protein, 9 aa, Homo sapiens
IPYKVIACC

SEQ ID NO: 146106 - protein, 9 aa, Homo sapiens
PYKVIACCG

SEQ ID NO: 146107 - protein, 9 aa, Homo sapiens
YKVIACCGG

SEQ ID NO: 146108 - protein, 9 aa, Homo sapiens
KVIACCGGG

SEQ ID NO: 146109 - protein, 9 aa, Homo sapiens
VIACCGGGC

SEQ ID NO: 146110 - protein, 9 aa, Homo sapiens
IACCGGGCG

SEQ ID NO: 146111 - protein, 9 aa, Homo sapiens
ACCGGGCGS

SEQ ID NO: 146112 - protein, 9 aa, Homo sapiens
CCGGGCGSR

SEQ ID NO: 146113 - protein, 9 aa, Homo sapiens
CGGGCGSRL

SEQ ID NO: 146114 - protein, 9 aa, Homo sapiens
GGGCGSRLR

SEQ ID NO: 146115 - protein, 9 aa, Homo sapiens
GGCGSRLRV

SEQ ID NO: 146116 - protein, 9 aa, Homo sapiens
GCGSRLRVF

SEQ ID NO: 146117 - protein, 9 aa, Homo sapiens
CGSRLRVFV

SEQ ID NO: 146118 - protein, 9 aa, Homo sapiens
GSRLRVFVL

SEQ ID NO: 146119 - protein, 9 aa, Homo sapiens
SRLRVFVLA

SEQ ID NO: 146120 - protein, 9 aa, Homo sapiens
RLRVFVLAT

SEQ ID NO: 146121 - protein, 9 aa, Homo sapiens
LRVFVLATD

SEQ ID NO: 146122 - protein, 9 aa, Homo sapiens
RVFVLATDR

SEQ ID NO: 146123 - protein, 9 aa, Homo sapiens
VFVLATDRA

SEQ ID NO: 146124 - protein, 9 aa, Homo sapiens
FVLATDRAI

SEQ ID NO: 146125 - protein, 9 aa, Homo sapiens
VLATDRAIR

SEQ ID NO: 146126 - protein, 9 aa, Homo sapiens
LATDRAIRE

SEQ ID NO: 146127 - protein, 9 aa, Homo sapiens
ATDRAIREF

SEQ ID NO: 146128 - protein, 9 aa, Homo sapiens
TDRAIREFQ

SEQ ID NO: 146129 - protein, 9 aa, Homo sapiens
DRAIREFQS

SEQ ID NO: 146130 - protein, 9 aa, Homo sapiens
RAIREFQSL

SEQ ID NO: 146131 - protein, 9 aa, Homo sapiens
AIREFQSLL

SEQ ID NO: 146132 - protein, 9 aa, Homo sapiens
IREFQSLLL

SEQ ID NO: 146133 - protein, 9 aa, Homo sapiens
REFQSLLLE

SEQ ID NO: 146134 - protein, 9 aa, Homo sapiens
EFQSLLLEE

SEQ ID NO: 146135 - protein, 9 aa, Homo sapiens
FQSLLLEEL

SEQ ID NO: 146136 - protein, 9 aa, Homo sapiens
QSLLLEELQ

SEQ ID NO: 146137 - protein, 9 aa, Homo sapiens
SLLLEELQF

SEQ ID NO: 146138 - protein, 9 aa, Homo sapiens
LLLEELQFL

SEQ ID NO: 146139 - protein, 9 aa, Homo sapiens
LLEELQFLC

SEQ ID NO: 146140 - protein, 9 aa, Homo sapiens
LEELQFLCP

SEQ ID NO: 146141 - protein, 9 aa, Homo sapiens
EELQFLCPE

SEQ ID NO: 146142 - protein, 9 aa, Homo sapiens
ELQFLCPEC

SEQ ID NO: 146143 - protein, 9 aa, Homo sapiens
LQFLCPECR

SEQ ID NO: 146144 - protein, 9 aa, Homo sapiens
QFLCPECRE

SEQ ID NO: 146145 - protein, 9 aa, Homo sapiens
FLCPECREE

SEQ ID NO: 146146 - protein, 9 aa, Homo sapiens
LCPECREEI

SEQ ID NO: 146147 - protein, 9 aa, Homo sapiens
CPECREEIR

SEQ ID NO: 146148 - protein, 9 aa, Homo sapiens
PECREEIRN

SEQ ID NO: 146149 - protein, 9 aa, Homo sapiens
ECREEIRNG

SEQ ID NO: 146150 - protein, 9 aa, Homo sapiens
CREEIRNGG

SEQ ID NO: 146151 - protein, 9 aa, Homo sapiens
REEIRNGGR

SEQ ID NO: 146152 - protein, 9 aa, Homo sapiens
MHGPKPTVK

SEQ ID NO: 146153 - protein, 9 aa, Homo sapiens
HGPKPTVKD

SEQ ID NO: 146154 - protein, 9 aa, Homo sapiens
GPKPTVKDI

SEQ ID NO: 146155 - protein, 9 aa, Homo sapiens
PKPTVKDIE

SEQ ID NO: 146156 - protein, 9 aa, Homo sapiens
KPTVKDIEL

SEQ ID NO: 146157 - protein, 9 aa, Homo sapiens
PTVKDIELD

SEQ ID NO: 146158 - protein, 9 aa, Homo sapiens
TVKDIELDL

SEQ ID NO: 146159 - protein, 9 aa, Homo sapiens
VKDIELDLA

SEQ ID NO: 146160 - protein, 9 aa, Homo sapiens
KDIELDLAP

SEQ ID NO: 146161 - protein, 9 aa, Homo sapiens
DIELDLAPE

SEQ ID NO: 146162 - protein, 9 aa, Homo sapiens
IELDLAPEA

SEQ ID NO: 146163 - protein, 9 aa, Homo sapiens
ELDLAPEAV

SEQ ID NO: 146164 - protein, 9 aa, Homo sapiens
LDLAPEAVP

SEQ ID NO: 146165 - protein, 9 aa, Homo sapiens
DLAPEAVPL

SEQ ID NO: 146166 - protein, 9 aa, Homo sapiens
LAPEAVPLL

SEQ ID NO: 146167 - protein, 9 aa, Homo sapiens
APEAVPLLC

SEQ ID NO: 146168 - protein, 9 aa, Homo sapiens
PEAVPLLCN

SEQ ID NO: 146169 - protein, 9 aa, Homo sapiens
EAVPLLCNE

SEQ ID NO: 146170 - protein, 9 aa, Homo sapiens
AVPLLCNEQ

SEQ ID NO: 146171 - protein, 9 aa, Homo sapiens
VPLLCNEQL

SEQ ID NO: 146172 - protein, 9 aa, Homo sapiens
PLLCNEQLD

SEQ ID NO: 146173 - protein, 9 aa, Homo sapiens
LLCNEQLDS

SEQ ID NO: 146174 - protein, 9 aa, Homo sapiens
LCNEQLDSS

SEQ ID NO: 146175 - protein, 9 aa, Homo sapiens
CNEQLDSSD

SEQ ID NO: 146176 - protein, 9 aa, Homo sapiens
NEQLDSSDE

SEQ ID NO: 146177 - protein, 9 aa, Homo sapiens
EQLDSSDEE

SEQ ID NO: 146178 - protein, 9 aa, Homo sapiens
QLDSSDEED

SEQ ID NO: 146179 - protein, 9 aa, Homo sapiens
LDSSDEEDC

SEQ ID NO: 146180 - protein, 9 aa, Homo sapiens
DSSDEEDCI

SEQ ID NO: 146181 - protein, 9 aa, Homo sapiens
SSDEEDCID

SEQ ID NO: 146182 - protein, 9 aa, Homo sapiens
SDEEDCIDV

SEQ ID NO: 146183 - protein, 9 aa, Homo sapiens
DEEDCIDVV

SEQ ID NO: 146184 - protein, 9 aa, Homo sapiens
EEDCIDVVE

SEQ ID NO: 146185 - protein, 9 aa, Homo sapiens
EDCIDVVEP

SEQ ID NO: 146186 - protein, 9 aa, Homo sapiens
DCIDVVEPA

SEQ ID NO: 146187 - protein, 9 aa, Homo sapiens
CIDVVEPAQ

SEQ ID NO: 146188 - protein, 9 aa, Homo sapiens
IDVVEPAQQ

SEQ ID NO: 146189 - protein, 9 aa, Homo sapiens
DVVEPAQQA

SEQ ID NO: 146190 - protein, 9 aa, Homo sapiens
VVEPAQQAY

SEQ ID NO: 146191 - protein, 9 aa, Homo sapiens
VEPAQQAYR

SEQ ID NO: 146192 - protein, 9 aa, Homo sapiens
EPAQQAYRV

SEQ ID NO: 146193 - protein, 9 aa, Homo sapiens
PAQQAYRVV

SEQ ID NO: 146194 - protein, 9 aa, Homo sapiens
AQQAYRVVT

SEQ ID NO: 146195 - protein, 9 aa, Homo sapiens
QQAYRVVTL

SEQ ID NO: 146196 - protein, 9 aa, Homo sapiens
QAYRVVTLC

SEQ ID NO: 146197 - protein, 9 aa, Homo sapiens
AYRVVTLCT

SEQ ID NO: 146198 - protein, 9 aa, Homo sapiens
YRVVTLCTK

SEQ ID NO: 146199 - protein, 9 aa, Homo sapiens
RVVTLCTKC

SEQ ID NO: 146200 - protein, 9 aa, Homo sapiens
VVTLCTKCS

SEQ ID NO: 146201 - protein, 9 aa, Homo sapiens
VTLCTKCSS

SEQ ID NO: 146202 - protein, 9 aa, Homo sapiens
TLCTKCSST

SEQ ID NO: 146203 - protein, 9 aa, Homo sapiens
LCTKCSSTL

SEQ ID NO: 146204 - protein, 9 aa, Homo sapiens
CTKCSSTLR

SEQ ID NO: 146205 - protein, 9 aa, Homo sapiens
TKCSSTLRL

SEQ ID NO: 146206 - protein, 9 aa, Homo sapiens
KCSSTLRLV

SEQ ID NO: 146207 - protein, 9 aa, Homo sapiens
CSSTLRLVV

SEQ ID NO: 146208 - protein, 9 aa, Homo sapiens
SSTLRLVVE

SEQ ID NO: 146209 - protein, 9 aa, Homo sapiens
STLRLVVES

SEQ ID NO: 146210 - protein, 9 aa, Homo sapiens
TLRLVVESS

SEQ ID NO: 146211 - protein, 9 aa, Homo sapiens
LRLVVESSE

SEQ ID NO: 146212 - protein, 9 aa, Homo sapiens
RLVVESSEA

SEQ ID NO: 146213 - protein, 9 aa, Homo sapiens
LVVESSEAD

SEQ ID NO: 146214 - protein, 9 aa, Homo sapiens
VVESSEADI

SEQ ID NO: 146215 - protein, 9 aa, Homo sapiens
VESSEADIR

SEQ ID NO: 146216 - protein, 9 aa, Homo sapiens
ESSEADIRA

SEQ ID NO: 146217 - protein, 9 aa, Homo sapiens
SSEADIRAF

SEQ ID NO: 146218 - protein, 9 aa, Homo sapiens
SEADIRAFQ

SEQ ID NO: 146219 - protein, 9 aa, Homo sapiens
EADIRAFQE

SEQ ID NO: 146220 - protein, 9 aa, Homo sapiens
ADIRAFQEL

SEQ ID NO: 146221 - protein, 9 aa, Homo sapiens
DIRAFQELL

SEQ ID NO: 146222 - protein, 9 aa, Homo sapiens
IRAFQELLL

SEQ ID NO: 146223 - protein, 9 aa, Homo sapiens
RAFQELLLR

SEQ ID NO: 146224 - protein, 9 aa, Homo sapiens
AFQELLLRT

SEQ ID NO: 146225 - protein, 9 aa, Homo sapiens
FQELLLRTL

SEQ ID NO: 146226 - protein, 9 aa, Homo sapiens
QELLLRTLK

SEQ ID NO: 146227 - protein, 9 aa, Homo sapiens
ELLLRTLKI

SEQ ID NO: 146228 - protein, 9 aa, Homo sapiens
LLLRTLKIV

SEQ ID NO: 146229 - protein, 9 aa, Homo sapiens
LLRTLKIVC

SEQ ID NO: 146230 - protein, 9 aa, Homo sapiens
LRTLKIVCP

SEQ ID NO: 146231 - protein, 9 aa, Homo sapiens
RTLKIVCPR

SEQ ID NO: 146232 - protein, 9 aa, Homo sapiens
TLKIVCPRC

SEQ ID NO: 146233 - protein, 9 aa, Homo sapiens
LKIVCPRCA

SEQ ID NO: 146234 - protein, 9 aa, Homo sapiens
MIGKEATIP

SEQ ID NO: 146235 - protein, 9 aa, Homo sapiens
IGKEATIPD

SEQ ID NO: 146236 - protein, 9 aa, Homo sapiens
GKEATIPDI

SEQ ID NO: 146237 - protein, 9 aa, Homo sapiens
KEATIPDIE

SEQ ID NO: 146238 - protein, 9 aa, Homo sapiens
EATIPDIEL

SEQ ID NO: 146239 - protein, 9 aa, Homo sapiens
ATIPDIELE

SEQ ID NO: 146240 - protein, 9 aa, Homo sapiens
TIPDIELEL

SEQ ID NO: 146241 - protein, 9 aa, Homo sapiens
IPDIELELQ

SEQ ID NO: 146242 - protein, 9 aa, Homo sapiens
PDIELELQE

SEQ ID NO: 146243 - protein, 9 aa, Homo sapiens
DIELELQEL

SEQ ID NO: 146244 - protein, 9 aa, Homo sapiens
IELELQELV

SEQ ID NO: 146245 - protein, 9 aa, Homo sapiens
ELELQELVQ

SEQ ID NO: 146246 - protein, 9 aa, Homo sapiens
LELQELVQP

SEQ ID NO: 146247 - protein, 9 aa, Homo sapiens
ELQELVQPT

SEQ ID NO: 146248 - protein, 9 aa, Homo sapiens
LQELVQPTD

SEQ ID NO: 146249 - protein, 9 aa, Homo sapiens
QELVQPTDL

SEQ ID NO: 146250 - protein, 9 aa, Homo sapiens
ELVQPTDLH

SEQ ID NO: 146251 - protein, 9 aa, Homo sapiens
LVQPTDLHC

SEQ ID NO: 146252 - protein, 9 aa, Homo sapiens
VQPTDLHCY

SEQ ID NO: 146253 - protein, 9 aa, Homo sapiens
QPTDLHCYE

SEQ ID NO: 146254 - protein, 9 aa, Homo sapiens
PTDLHCYEE

SEQ ID NO: 146255 - protein, 9 aa, Homo sapiens
TDLHCYEEL

SEQ ID NO: 146256 - protein, 9 aa, Homo sapiens
DLHCYEELS

SEQ ID NO: 146257 - protein, 9 aa, Homo sapiens
LHCYEELSE

SEQ ID NO: 146258 - protein, 9 aa, Homo sapiens
HCYEELSEE

SEQ ID NO: 146259 - protein, 9 aa, Homo sapiens
CYEELSEEE

SEQ ID NO: 146260 - protein, 9 aa, Homo sapiens
YEELSEEET

SEQ ID NO: 146261 - protein, 9 aa, Homo sapiens
EELSEEETE

SEQ ID NO: 146262 - protein, 9 aa, Homo sapiens
ELSEEETEE

SEQ ID NO: 146263 - protein, 9 aa, Homo sapiens
LSEEETEEE

SEQ ID NO: 146264 - protein, 9 aa, Homo sapiens
SEEETEEEP

SEQ ID NO: 146265 - protein, 9 aa, Homo sapiens
EEETEEEPQ

SEQ ID NO: 146266 - protein, 9 aa, Homo sapiens
EETEEEPQH

SEQ ID NO: 146267 - protein, 9 aa, Homo sapiens
ETEEEPQHI

SEQ ID NO: 146268 - protein, 9 aa, Homo sapiens
TEEEPQHIP

SEQ ID NO: 146269 - protein, 9 aa, Homo sapiens
EEEPQHIPY

SEQ ID NO: 146270 - protein, 9 aa, Homo sapiens
EEPQHIPYK

SEQ ID NO: 146271 - protein, 9 aa, Homo sapiens
EPQHIPYKI

SEQ ID NO: 146272 - protein, 9 aa, Homo sapiens
PQHIPYKIV

SEQ ID NO: 146273 - protein, 9 aa, Homo sapiens
QHIPYKIVA

SEQ ID NO: 146274 - protein, 9 aa, Homo sapiens
HIPYKIVAP

SEQ ID NO: 146275 - protein, 9 aa, Homo sapiens
IPYKIVAPC

SEQ ID NO: 146276 - protein, 9 aa, Homo sapiens
PYKIVAPCC

SEQ ID NO: 146277 - protein, 9 aa, Homo sapiens
YKIVAPCCF

SEQ ID NO: 146278 - protein, 9 aa, Homo sapiens
KIVAPCCFC

SEQ ID NO: 146279 - protein, 9 aa, Homo sapiens
IVAPCCFCE

SEQ ID NO: 146280 - protein, 9 aa, Homo sapiens
VAPCCFCES

SEQ ID NO: 146281 - protein, 9 aa, Homo sapiens
APCCFCESK

SEQ ID NO: 146282 - protein, 9 aa, Homo sapiens
PCCFCESKL

SEQ ID NO: 146283 - protein, 9 aa, Homo sapiens
CCFCESKLR

SEQ ID NO: 146284 - protein, 9 aa, Homo sapiens
CFCESKLRL

SEQ ID NO: 146285 - protein, 9 aa, Homo sapiens
FCESKLRLI

SEQ ID NO: 146286 - protein, 9 aa, Homo sapiens
CESKLRLIV

SEQ ID NO: 146287 - protein, 9 aa, Homo sapiens
ESKLRLIVV

SEQ ID NO: 146288 - protein, 9 aa, Homo sapiens
SKLRLIVVA

SEQ ID NO: 146289 - protein, 9 aa, Homo sapiens
KLRLIVVAT

SEQ ID NO: 146290 - protein, 9 aa, Homo sapiens
LRLIVVATS

SEQ ID NO: 146291 - protein, 9 aa, Homo sapiens
RLIVVATSF

SEQ ID NO: 146292 - protein, 9 aa, Homo sapiens
LIVVATSFG

SEQ ID NO: 146293 - protein, 9 aa, Homo sapiens
IVVATSFGI

SEQ ID NO: 146294 - protein, 9 aa, Homo sapiens
VVATSFGIR

SEQ ID NO: 146295 - protein, 9 aa, Homo sapiens
VATSFGIRA

SEQ ID NO: 146296 - protein, 9 aa, Homo sapiens
ATSFGIRAQ

SEQ ID NO: 146297 - protein, 9 aa, Homo sapiens
TSFGIRAQE

SEQ ID NO: 146298 - protein, 9 aa, Homo sapiens
SFGIRAQEE

SEQ ID NO: 146299 - protein, 9 aa, Homo sapiens
FGIRAQEEL

SEQ ID NO: 146300 - protein, 9 aa, Homo sapiens
GIRAQEELL

SEQ ID NO: 146301 - protein, 9 aa, Homo sapiens
IRAQEELLF

SEQ ID NO: 146302 - protein, 9 aa, Homo sapiens
RAQEELLFG

SEQ ID NO: 146303 - protein, 9 aa, Homo sapiens
AQEELLFGE

SEQ ID NO: 146304 - protein, 9 aa, Homo sapiens
QEELLFGEV

SEQ ID NO: 146305 - protein, 9 aa, Homo sapiens
EELLFGEVK

SEQ ID NO: 146306 - protein, 9 aa, Homo sapiens
ELLFGEVKL

SEQ ID NO: 146307 - protein, 9 aa, Homo sapiens
LLFGEVKLV

SEQ ID NO: 146308 - protein, 9 aa, Homo sapiens
LFGEVKLVC

SEQ ID NO: 146309 - protein, 9 aa, Homo sapiens
FGEVKLVCP

SEQ ID NO: 146310 - protein, 9 aa, Homo sapiens
GEVKLVCPG

SEQ ID NO: 146311 - protein, 9 aa, Homo sapiens
EVKLVCPGC

SEQ ID NO: 146312 - protein, 9 aa, Homo sapiens
VKLVCPGCR

SEQ ID NO: 146313 - protein, 9 aa, Homo sapiens
KLVCPGCRE

SEQ ID NO: 146314 - protein, 9 aa, Homo sapiens
LVCPGCREK

SEQ ID NO: 146315 - protein, 9 aa, Homo sapiens
VCPGCREKL

SEQ ID NO: 146316 - protein, 9 aa, Homo sapiens
CPGCREKLR

SEQ ID NO: 146317 - protein, 9 aa, Homo sapiens
PGCREKLRH

SEQ ID NO: 146318 - protein, 9 aa, Homo sapiens
GCREKLRHV

SEQ ID NO: 146319 - protein, 9 aa, Homo sapiens
MRGNVPQLK

SEQ ID NO: 146320 - protein, 9 aa, Homo sapiens
RGNVPQLKD

SEQ ID NO: 146321 - protein, 9 aa, Homo sapiens
GNVPQLKDI

SEQ ID NO: 146322 - protein, 9 aa, Homo sapiens
NVPQLKDIV

SEQ ID NO: 146323 - protein, 9 aa, Homo sapiens
VPQLKDIVL

SEQ ID NO: 146324 - protein, 9 aa, Homo sapiens
PQLKDIVLE

SEQ ID NO: 146325 - protein, 9 aa, Homo sapiens
QLKDIVLEL

SEQ ID NO: 146326 - protein, 9 aa, Homo sapiens
LKDIVLELT

SEQ ID NO: 146327 - protein, 9 aa, Homo sapiens
KDIVLELTP

SEQ ID NO: 146328 - protein, 9 aa, Homo sapiens
DIVLELTPQ

SEQ ID NO: 146329 - protein, 9 aa, Homo sapiens
IVLELTPQP

SEQ ID NO: 146330 - protein, 9 aa, Homo sapiens
VLELTPQPE

SEQ ID NO: 146331 - protein, 9 aa, Homo sapiens
LELTPQPEI

SEQ ID NO: 146332 - protein, 9 aa, Homo sapiens
ELTPQPEID

SEQ ID NO: 146333 - protein, 9 aa, Homo sapiens
LTPQPEIDL

SEQ ID NO: 146334 - protein, 9 aa, Homo sapiens
TPQPEIDLQ

SEQ ID NO: 146335 - protein, 9 aa, Homo sapiens
PQPEIDLQC

SEQ ID NO: 146336 - protein, 9 aa, Homo sapiens
QPEIDLQCY

SEQ ID NO: 146337 - protein, 9 aa, Homo sapiens
PEIDLQCYE

SEQ ID NO: 146338 - protein, 9 aa, Homo sapiens
EIDLQCYEQ

SEQ ID NO: 146339 - protein, 9 aa, Homo sapiens
IDLQCYEQF

SEQ ID NO: 146340 - protein, 9 aa, Homo sapiens
DLQCYEQFD

SEQ ID NO: 146341 - protein, 9 aa, Homo sapiens
LQCYEQFDS

SEQ ID NO: 146342 - protein, 9 aa, Homo sapiens
QCYEQFDSS

SEQ ID NO: 146343 - protein, 9 aa, Homo sapiens
CYEQFDSSD

SEQ ID NO: 146344 - protein, 9 aa, Homo sapiens
YEQFDSSDE

SEQ ID NO: 146345 - protein, 9 aa, Homo sapiens
EQFDSSDEE

SEQ ID NO: 146346 - protein, 9 aa, Homo sapiens
QFDSSDEED

SEQ ID NO: 146347 - protein, 9 aa, Homo sapiens
FDSSDEEDE

SEQ ID NO: 146348 - protein, 9 aa, Homo sapiens
DSSDEEDEV

SEQ ID NO: 146349 - protein, 9 aa, Homo sapiens
SSDEEDEVD

SEQ ID NO: 146350 - protein, 9 aa, Homo sapiens
SDEEDEVDN

SEQ ID NO: 146351 - protein, 9 aa, Homo sapiens
DEEDEVDNM

SEQ ID NO: 146352 - protein, 9 aa, Homo sapiens
EEDEVDNMR

SEQ ID NO: 146353 - protein, 9 aa, Homo sapiens
EDEVDNMRD

SEQ ID NO: 146354 - protein, 9 aa, Homo sapiens
DEVDNMRDQ

SEQ ID NO: 146355 - protein, 9 aa, Homo sapiens
EVDNMRDQP

SEQ ID NO: 146356 - protein, 9 aa, Homo sapiens
VDNMRDQPA

SEQ ID NO: 146357 - protein, 9 aa, Homo sapiens
DNMRDQPAR

SEQ ID NO: 146358 - protein, 9 aa, Homo sapiens
NMRDQPARQ

SEQ ID NO: 146359 - protein, 9 aa, Homo sapiens
MRDQPARQA

SEQ ID NO: 146360 - protein, 9 aa, Homo sapiens
RDQPARQAG

SEQ ID NO: 146361 - protein, 9 aa, Homo sapiens
DQPARQAGQ

SEQ ID NO: 146362 - protein, 9 aa, Homo sapiens
QPARQAGQD

SEQ ID NO: 146363 - protein, 9 aa, Homo sapiens
PARQAGQDT

SEQ ID NO: 146364 - protein, 9 aa, Homo sapiens
ARQAGQDTC

SEQ ID NO: 146365 - protein, 9 aa, Homo sapiens
RQAGQDTCY

SEQ ID NO: 146366 - protein, 9 aa, Homo sapiens
QAGQDTCYR

SEQ ID NO: 146367 - protein, 9 aa, Homo sapiens
AGQDTCYRI

SEQ ID NO: 146368 - protein, 9 aa, Homo sapiens
GQDTCYRIK

SEQ ID NO: 146369 - protein, 9 aa, Homo sapiens
QDTCYRIKV

SEQ ID NO: 146370 - protein, 9 aa, Homo sapiens
DTCYRIKVH

SEQ ID NO: 146371 - protein, 9 aa, Homo sapiens
TCYRIKVHC

SEQ ID NO: 146372 - protein, 9 aa, Homo sapiens
CYRIKVHCC

SEQ ID NO: 146373 - protein, 9 aa, Homo sapiens
YRIKVHCCR

SEQ ID NO: 146374 - protein, 9 aa, Homo sapiens
RIKVHCCRC

SEQ ID NO: 146375 - protein, 9 aa, Homo sapiens
IKVHCCRCS

SEQ ID NO: 146376 - protein, 9 aa, Homo sapiens
KVHCCRCSS

SEQ ID NO: 146377 - protein, 9 aa, Homo sapiens
VHCCRCSSV

SEQ ID NO: 146378 - protein, 9 aa, Homo sapiens
HCCRCSSVV

SEQ ID NO: 146379 - protein, 9 aa, Homo sapiens
CCRCSSVVQ

SEQ ID NO: 146380 - protein, 9 aa, Homo sapiens
CRCSSVVQL

SEQ ID NO: 146381 - protein, 9 aa, Homo sapiens
RCSSVVQLA

SEQ ID NO: 146382 - protein, 9 aa, Homo sapiens
CSSVVQLAV

SEQ ID NO: 146383 - protein, 9 aa, Homo sapiens
SSVVQLAVE

SEQ ID NO: 146384 - protein, 9 aa, Homo sapiens
SVVQLAVES

SEQ ID NO: 146385 - protein, 9 aa, Homo sapiens
VVQLAVESS

SEQ ID NO: 146386 - protein, 9 aa, Homo sapiens
VQLAVESSG

SEQ ID NO: 146387 - protein, 9 aa, Homo sapiens
QLAVESSGD

SEQ ID NO: 146388 - protein, 9 aa, Homo sapiens
LAVESSGDS

SEQ ID NO: 146389 - protein, 9 aa, Homo sapiens
AVESSGDSL

SEQ ID NO: 146390 - protein, 9 aa, Homo sapiens
VESSGDSLR

SEQ ID NO: 146391 - protein, 9 aa, Homo sapiens
ESSGDSLRI

SEQ ID NO: 146392 - protein, 9 aa, Homo sapiens
SSGDSLRIF

SEQ ID NO: 146393 - protein, 9 aa, Homo sapiens
SGDSLRIFQ

SEQ ID NO: 146394 - protein, 9 aa, Homo sapiens
GDSLRIFQQ

SEQ ID NO: 146395 - protein, 9 aa, Homo sapiens
DSLRIFQQM

SEQ ID NO: 146396 - protein, 9 aa, Homo sapiens
SLRIFQQML

SEQ ID NO: 146397 - protein, 9 aa, Homo sapiens
LRIFQQMLL

SEQ ID NO: 146398 - protein, 9 aa, Homo sapiens
RIFQQMLLG

SEQ ID NO: 146399 - protein, 9 aa, Homo sapiens
IFQQMLLGD

SEQ ID NO: 146400 - protein, 9 aa, Homo sapiens
FQQMLLGDL

SEQ ID NO: 146401 - protein, 9 aa, Homo sapiens
QQMLLGDLS

SEQ ID NO: 146402 - protein, 9 aa, Homo sapiens
QMLLGDLSL

SEQ ID NO: 146403 - protein, 9 aa, Homo sapiens
MLLGDLSLV

SEQ ID NO: 146404 - protein, 9 aa, Homo sapiens
LLGDLSLVC

SEQ ID NO: 146405 - protein, 9 aa, Homo sapiens
LGDLSLVCP

SEQ ID NO: 146406 - protein, 9 aa, Homo sapiens
GDLSLVCPW

SEQ ID NO: 146407 - protein, 9 aa, Homo sapiens
DLSLVCPWC

SEQ ID NO: 146408 - protein, 9 aa, Homo sapiens
LSLVCPWCA

SEQ ID NO: 146409 - protein, 9 aa, Homo sapiens
SLVCPWCAT

SEQ ID NO: 146410 - protein, 9 aa, Homo sapiens
LVCPWCATN

SEQ ID NO: 146411 - protein, 9 aa, Homo sapiens
MHGPKPTLQ

SEQ ID NO: 146412 - protein, 9 aa, Homo sapiens
HGPKPTLQE

SEQ ID NO: 146413 - protein, 9 aa, Homo sapiens
GPKPTLQEI

SEQ ID NO: 146414 - protein, 9 aa, Homo sapiens
PKPTLQEII

SEQ ID NO: 146415 - protein, 9 aa, Homo sapiens
KPTLQEIIL

SEQ ID NO: 146416 - protein, 9 aa, Homo sapiens
PTLQEIILH

SEQ ID NO: 146417 - protein, 9 aa, Homo sapiens
TLQEIILHL

SEQ ID NO: 146418 - protein, 9 aa, Homo sapiens
LQEIILHLQ

SEQ ID NO: 146419 - protein, 9 aa, Homo sapiens
QEIILHLQP

SEQ ID NO: 146420 - protein, 9 aa, Homo sapiens
EIILHLQPQ

SEQ ID NO: 146421 - protein, 9 aa, Homo sapiens
IILHLQPQN

SEQ ID NO: 146422 - protein, 9 aa, Homo sapiens
ILHLQPQNE

SEQ ID NO: 146423 - protein, 9 aa, Homo sapiens
LHLQPQNEI

SEQ ID NO: 146424 - protein, 9 aa, Homo sapiens
HLQPQNEIN

SEQ ID NO: 146425 - protein, 9 aa, Homo sapiens
LQPQNEINS

SEQ ID NO: 146426 - protein, 9 aa, Homo sapiens
QPQNEINSV

SEQ ID NO: 146427 - protein, 9 aa, Homo sapiens
PQNEINSVD

SEQ ID NO: 146428 - protein, 9 aa, Homo sapiens
QNEINSVDL

SEQ ID NO: 146429 - protein, 9 aa, Homo sapiens
NEINSVDLQ

SEQ ID NO: 146430 - protein, 9 aa, Homo sapiens
EINSVDLQC

SEQ ID NO: 146431 - protein, 9 aa, Homo sapiens
INSVDLQCY

SEQ ID NO: 146432 - protein, 9 aa, Homo sapiens
NSVDLQCYE

SEQ ID NO: 146433 - protein, 9 aa, Homo sapiens
SVDLQCYEH

SEQ ID NO: 146434 - protein, 9 aa, Homo sapiens
VDLQCYEHL

SEQ ID NO: 146435 - protein, 9 aa, Homo sapiens
DLQCYEHLS

SEQ ID NO: 146436 - protein, 9 aa, Homo sapiens
LQCYEHLSD

SEQ ID NO: 146437 - protein, 9 aa, Homo sapiens
QCYEHLSDL

SEQ ID NO: 146438 - protein, 9 aa, Homo sapiens
CYEHLSDLE

SEQ ID NO: 146439 - protein, 9 aa, Homo sapiens
YEHLSDLEE

SEQ ID NO: 146440 - protein, 9 aa, Homo sapiens
EHLSDLEEE

SEQ ID NO: 146441 - protein, 9 aa, Homo sapiens
HLSDLEEEY

SEQ ID NO: 146442 - protein, 9 aa, Homo sapiens
LSDLEEEYD

SEQ ID NO: 146443 - protein, 9 aa, Homo sapiens
SDLEEEYDE

SEQ ID NO: 146444 - protein, 9 aa, Homo sapiens
DLEEEYDET

SEQ ID NO: 146445 - protein, 9 aa, Homo sapiens
LEEEYDETD

SEQ ID NO: 146446 - protein, 9 aa, Homo sapiens
EEEYDETDD

SEQ ID NO: 146447 - protein, 9 aa, Homo sapiens
EEYDETDDV

SEQ ID NO: 146448 - protein, 9 aa, Homo sapiens
EYDETDDVN

SEQ ID NO: 146449 - protein, 9 aa, Homo sapiens
YDETDDVNH

SEQ ID NO: 146450 - protein, 9 aa, Homo sapiens
DETDDVNHR

SEQ ID NO: 146451 - protein, 9 aa, Homo sapiens
ETDDVNHRQ

SEQ ID NO: 146452 - protein, 9 aa, Homo sapiens
TDDVNHRQL

SEQ ID NO: 146453 - protein, 9 aa, Homo sapiens
DDVNHRQLP

SEQ ID NO: 146454 - protein, 9 aa, Homo sapiens
DVNHRQLPA

SEQ ID NO: 146455 - protein, 9 aa, Homo sapiens
VNHRQLPAR

SEQ ID NO: 146456 - protein, 9 aa, Homo sapiens
NHRQLPARR

SEQ ID NO: 146457 - protein, 9 aa, Homo sapiens
HRQLPARRA

SEQ ID NO: 146458 - protein, 9 aa, Homo sapiens
RQLPARRAE

SEQ ID NO: 146459 - protein, 9 aa, Homo sapiens
QLPARRAEP

SEQ ID NO: 146460 - protein, 9 aa, Homo sapiens
LPARRAEPQ

SEQ ID NO: 146461 - protein, 9 aa, Homo sapiens
PARRAEPQR

SEQ ID NO: 146462 - protein, 9 aa, Homo sapiens
ARRAEPQRH

SEQ ID NO: 146463 - protein, 9 aa, Homo sapiens
RRAEPQRHT

SEQ ID NO: 146464 - protein, 9 aa, Homo sapiens
RAEPQRHTI

SEQ ID NO: 146465 - protein, 9 aa, Homo sapiens
AEPQRHTIV

SEQ ID NO: 146466 - protein, 9 aa, Homo sapiens
EPQRHTIVC

SEQ ID NO: 146467 - protein, 9 aa, Homo sapiens
PQRHTIVCM

SEQ ID NO: 146468 - protein, 9 aa, Homo sapiens
QRHTIVCMC

SEQ ID NO: 146469 - protein, 9 aa, Homo sapiens
RHTIVCMCC

SEQ ID NO: 146470 - protein, 9 aa, Homo sapiens
HTIVCMCCK

SEQ ID NO: 146471 - protein, 9 aa, Homo sapiens
TIVCMCCKC

SEQ ID NO: 146472 - protein, 9 aa, Homo sapiens
IVCMCCKCE

SEQ ID NO: 146473 - protein, 9 aa, Homo sapiens
VCMCCKCES

SEQ ID NO: 146474 - protein, 9 aa, Homo sapiens
CMCCKCESR

SEQ ID NO: 146475 - protein, 9 aa, Homo sapiens
MCCKCESRL

SEQ ID NO: 146476 - protein, 9 aa, Homo sapiens
CCKCESRLQ

SEQ ID NO: 146477 - protein, 9 aa, Homo sapiens
CKCESRLQF

SEQ ID NO: 146478 - protein, 9 aa, Homo sapiens
KCESRLQFV

SEQ ID NO: 146479 - protein, 9 aa, Homo sapiens
CESRLQFVV

SEQ ID NO: 146480 - protein, 9 aa, Homo sapiens
ESRLQFVVE

SEQ ID NO: 146481 - protein, 9 aa, Homo sapiens
SRLQFVVES

SEQ ID NO: 146482 - protein, 9 aa, Homo sapiens
RLQFVVESS

SEQ ID NO: 146483 - protein, 9 aa, Homo sapiens
LQFVVESSA

SEQ ID NO: 146484 - protein, 9 aa, Homo sapiens
QFVVESSAD

SEQ ID NO: 146485 - protein, 9 aa, Homo sapiens
FVVESSADD

SEQ ID NO: 146486 - protein, 9 aa, Homo sapiens
VVESSADDL

SEQ ID NO: 146487 - protein, 9 aa, Homo sapiens
VESSADDLR

SEQ ID NO: 146488 - protein, 9 aa, Homo sapiens
ESSADDLRS

SEQ ID NO: 146489 - protein, 9 aa, Homo sapiens
SSADDLRSL

SEQ ID NO: 146490 - protein, 9 aa, Homo sapiens
SADDLRSLQ

SEQ ID NO: 146491 - protein, 9 aa, Homo sapiens
ADDLRSLQQ

SEQ ID NO: 146492 - protein, 9 aa, Homo sapiens
DDLRSLQQL

SEQ ID NO: 146493 - protein, 9 aa, Homo sapiens
DLRSLQQLF

SEQ ID NO: 146494 - protein, 9 aa, Homo sapiens
LRSLQQLFL

SEQ ID NO: 146495 - protein, 9 aa, Homo sapiens
RSLQQLFLS

SEQ ID NO: 146496 - protein, 9 aa, Homo sapiens
SLQQLFLST

SEQ ID NO: 146497 - protein, 9 aa, Homo sapiens
LQQLFLSTL

SEQ ID NO: 146498 - protein, 9 aa, Homo sapiens
QQLFLSTLS

SEQ ID NO: 146499 - protein, 9 aa, Homo sapiens
QLFLSTLSF

SEQ ID NO: 146500 - protein, 9 aa, Homo sapiens
LFLSTLSFV

SEQ ID NO: 146501 - protein, 9 aa, Homo sapiens
FLSTLSFVC

SEQ ID NO: 146502 - protein, 9 aa, Homo sapiens
LSTLSFVCP

SEQ ID NO: 146503 - protein, 9 aa, Homo sapiens
STLSFVCPW

SEQ ID NO: 146504 - protein, 9 aa, Homo sapiens
TLSFVCPWC

SEQ ID NO: 146505 - protein, 9 aa, Homo sapiens
LSFVCPWCA

SEQ ID NO: 146506 - protein, 9 aa, Homo sapiens
SFVCPWCAT

SEQ ID NO: 146507 - protein, 9 aa, Homo sapiens
FVCPWCATH

SEQ ID NO: 146508 - protein, 9 aa, Homo sapiens
VCPWCATHQ
